(19) United States
(12) Patent Application Publication
(10) Pub. No.: US 2023/0279120 A1
(43) Pub. Date: Sep. 7, 2023

(54) METHODS OF TREATING OR INHIBITING CARDIOVASCULAR DISEASES

(71) Applicant: TrueBinding, Inc., Foster City, CA (US)

(72) Inventors: Dongxu Sun, Palo Alto, CA (US); Suhail Rasool, Foster City, CA (US); Yew Ann Leong, San Fransisco, CA (US); George M. Haig, Melbourne, FL (US); Jenny Ulrika Johansson, Mountainview, CA (US); Ludmila Anatolievna Volobouevna, Walnut Creek, CA (US)

(21) Appl. No.: 18/053,191

(22) Filed: Nov. 7, 2022

Related U.S. Application Data
(60) Provisional application No. 63/263,773, filed on Nov. 9, 2021.

(51) Int. Cl. C07K 16/28; A61P 9/10; A61P 25/28

(52) U.S. Cl. CPC C07K 16/2851; A61P 9/10; A61P 25/28; A61K 2039/545

(57) ABSTRACT

Disclosed herein are methods and compositions for inhibiting, preventing, ameliorating, reducing, or treating cardiovascular diseases, for example, stroke, traumatic brain injury, cerebral amyloid angiopathy, atherosclerosis, myocardial infarction, and/or diseases associated with fibrin activity or dysfunction. These methods and compositions involve antibodies that can bind to Galectin-3 and inhibit, prevent, ameliorate, reduce, or treat the cardiovascular diseases in a patient by reducing inflammation and/or inhibiting oligomerization of proteins associated with pathology such as amyloid beta or fibrin.

### CROSS-REFERENCE TO RELATED APPLICATIONS

[0001] This application claims the benefit of priority of U.S. Provisional Pat. Application No. 63/263,773, filed Nov. 09, 2021, which is hereby expressly incorporated by reference in its entirety, including any appendices filed therewith.

### REFERENCE TO SEQUENCE LISTING

[0002] The present application is being filed along with a Sequence Listing in electronic format. The Sequence Listing is provided as a file entitled ReplacementIMMUT032ASeqListing. XML, which was created and last modified on May 15, 2023, which is 1,425,609 bytes in size. The information in the electronic Sequence Listing is hereby incorporated by reference in its entirety.

### FIELD

[0003] Aspects of the present disclosure relate generally to methods and compositions for inhibiting, preventing, ameliorating, reducing, or treating cardiovascular diseases. These methods and compositions involve the use of antibodies that bind to Galectin-3 (Gal3).

### BACKGROUND

[0004] Galectin-3 (Gal3, GAL3) is a lectin, or a carbohydrate-binding protein, with specificity towards beta-galactosides. In human cells, Gal3 is expressed and can be found in the nucleus, cytoplasm, cell surface, and in the extracellular space. Gal3 recognizes and interacts with beta-galactose conjugates on various proteins.

### SUMMARY

[0005] Galectin-3 (Gal3) has been implicated to have immunomodulatory activity. An example of this is the interaction between Gal3 and T-cell immunoglobulin and mucin-domain containing-3 (TIM-3), which causes suppression of immune responses such as T cell activation and may enable cancer cells to evade immune clearance. This phenomenon and methods to inhibit the same are exemplified in WO 2019/023247 and WO 2020/160156, each of which is hereby expressly incorporated by reference in its entirety. Disclosed herein are methods for inhibiting, reducing, preventing, and/or treating stroke in a subject in need thereof. In some embodiments, the methods comprise administering an anti-Gal3 antibody or binding fragment thereof to the subject, thereby inhibiting, reducing, preventing, and/or treating the stroke. In some embodiments, the stroke is an ischemic stroke, thrombotic stroke, embolic stroke, transient ischemic attack, hemorrhagic stroke, intracerebral hemorrhage, or subarachnoid hemorrhage.

[0006] Also disclosed herein are methods for inhibiting, reducing, preventing, and/or treating traumatic brain injury (TBI) in a subject in need thereof. In some embodiments, the methods comprise administering an anti-Gal3 antibody or binding fragment thereof to the subject, thereby inhibiting, reducing, preventing, and/or treating the TBI. In some embodiments, the TBI is associated with a concussion, edema, diffuse axonal injury, spinal cord injury, coma, neuroinflammation, microhemorrhage, astrocytosis, activated microglia, and/or hematoma.

[0007] Also disclosed herein are methods for inhibiting, reducing, preventing, and/or treating a disorder associated with fibrin activity or dysfunction in a subject in need thereof. In some embodiments, the methods comprise administering an anti-Gal3 antibody or binding fragment thereof to the subject, thereby inhibiting, reducing, preventing, and/or treating the disorder associated with fibrin activity or dysfunction. In some embodiments, the disorder associated with fibrin activity or dysfunction comprises atherosclerosis, thrombosis, thromboembolism, carotid artery disease, coronary artery disease, peripheral artery disease, myocardial infarction, heart failure, heart attack, hypertension, chronic kidney disease, coagulopathy, or thrombocytopathy.

[0008] Also disclosed herein are methods for inhibiting, reducing, preventing, and/or treating a disorder associated with inflammation and elevation of proinflammatory cytokines in a subject in need thereof. The methods comprise administering an anti-Gal3 antibody or binding fragment thereof to the subject, thereby treating the disorder associated with inflammation. In some embodiments, the administration reduces proinflammatory cytokines, such as circulating cytokines, in the subject.

[0009] Also disclosed herein are methods comprising administering 5 unit doses of an anti-Gal3 antibody or binding fragment thereof, where each unit dose comprises 1000 mg or about 1000 mg of the anti-Gal3 antibody or binding fragment thereof, where the unit doses are administered every 7 days or about 7 days, and where each unit dose is administered over the course of 1 hour or about 1 hour.

[0010] Also disclosed herein are single-use sealed injectable glass vials comprising 8 mL of 20 mg/mL of an anti-Gal3 antibody or binding fragment thereof.

[0011] Also disclosed herein are IV infusion bags comprising 1000 mg or about 1000 mg of an anti-Gal3 antibody or binding fragment thereof dissolved in 250 mL or about 250 mL of saline.

[0012] In some embodiments, the anti-Gal3 antibody or binding fragment is any one or more of the anti-Gal3 antibodies or binding fragments thereof, or any portion or component of any one or more of the anti-Gal3 antibodies or binding fragments thereof disclosed herein, including but not limited to 1, 2, 3, 4, 5, or 6 CDRs, heavy chain variable regions, light chain variable regions, heavy chains, or light chains.

### BRIEF DESCRIPTION OF THE DRAWINGS

[0013] In addition to the features described above, additional features and variations will be readily apparent from the following descriptions of the drawings and exemplary embodiments. It is to be understood that these drawings depict typical embodiments and are not intended to be limiting in scope.

[0014] FIG. 1 depicts exemplary protein sequences of Gal3.

[0015] FIG. 2 depicts exemplary peptide sequences of Gal3 used to generate and analyze antibodies.

[0016] FIG. 3A depicts exemplary variable heavy chain complementarity-determining region (CDR) 1 for anti-Gal3 antibodies disclosed herein. In some embodiments, any of the compositions or methods provided herein can include one or more of the variable heavy chain CDR1 provided herein.

[0017] FIG. 3B depicts exemplary variable heavy chain CDR2 for anti-Gal3 antibodies disclosed herein. In some embodiments, any of the compositions or methods provided herein can include one or more of the variable heavy chain CDR2 provided herein.

[0018] FIG. 3C depicts exemplary variable heavy chain CDR3 for anti-Gal3 antibodies disclosed herein. In some embodiments, any of the compositions or methods provided herein can include one or more of the variable heavy chain CDR3 provided herein.

[0019] FIG. 4A depicts exemplary variable light chain CDR1 for anti-Gal3 antibodies disclosed herein. In some embodiments, any of the compositions or methods provided herein can include one or more of the variable light chain CDR1 provided herein.

[0020] FIG. 4B depicts exemplary variable light chain CDR2 for anti-Gal3 antibodies disclosed herein. In some embodiments, any of the compositions or methods provided herein can include one or more of the variable light chain CDR2 provided herein.

[0021] FIG. 4C depicts exemplary variable light chain CDR3 for anti-Gal3 antibodies disclosed herein. In some embodiments, any of the compositions or methods provided herein can include one or more of the variable light chain CDR3 provided herein.

[0022] FIG. 5 depicts exemplary heavy chain variable region (VH) sequences for anti-Gal3 antibodies disclosed herein. In some embodiments, any of the compositions or methods provided herein can include one or more of the VH sequences provided herein.

[0023] FIG. 6 depicts exemplary light chain variable region (VL) sequences for anti-Gal3 antibodies disclosed herein. In some embodiments, any of the compositions or methods provided herein can include one or more of the VL sequences provided herein.

[0024] FIG. 7 depicts exemplary combinations of heavy and light chain CDRs (CDR1, CDR2, and CDR3) of exemplary anti-Gal3 antibodies disclosed herein. In some embodiments, any of the compositions or methods provided herein can include one or more of the heavy and light chain CDR combinations provided herein.

[0025] FIG. 8 depicts exemplary combinations of heavy and light chain variable regions of exemplary anti-Gal3 antibodies disclosed herein. In some embodiments, any of the compositions or methods provided herein can include one or more of the heavy and light chain variable region combinations provided herein.

[0026] FIG. 9 depicts exemplary heavy chain (HC) sequences and light chain (LC) sequences, and possible pairings for exemplary anti-Gal3 antibodies disclosed herein. In some embodiments, any of the compositions or methods provided herein can include one or more of the HC or LC, or pairs of HC and LC sequences provided herein.

[0027] FIG. 10 depicts peptides that were found to bind to exemplary anti-Gal3 antibodies disclosed herein (according to the peptide nomenclature depicted in FIG. 2 as discussed herein) and binning of these exemplary antibodies.

[0028] FIG. 11A depicts K_{D} (M) values of Gal3 binding for exemplary anti-Gal3 antibodies disclosed herein.

[0029] FIG. 11B depicts antibodies affinities (K_{D}) of anti-Gal3 humanized antibodies TB001 (IMT001) and TB006 (IMT006) for human, cynomolgus, rat, and mouse Gal3.

[0030] FIG. 12 depicts antibody names used throughout the present disclosure refer to the same antibody (with exemplary peptide and nucleic acid sequences provided elsewhere in the disclosure and appropriately attributed to at least one of the depicted names) and may be used interchangeably. The names shown in a column correspond to the same antibody.

[0031] FIG. 13 depicts an alignment of hinge and constant heavy chain domain 2 (C_{H}2) domain amino acid sequences of wild-type human immunoglobulin G1 (IgG1), IgG2 and IgG4 as well as their sigma variants. The alignment above uses EU numbering. Residues identical to wild-type IgG1 are indicated as dots; gaps are indicated with hyphens. Sequence is given explicitly if it differs from wild-type IgG1 or from the parental subtype for σ variants. Open boxes beneath the alignment correspond to International Immunogenetics Information System (IMGT) strand definitions. Boxes beneath the alignment correspond to the strand and helix secondary structure assignment for wild-type IgG1. Residues 267-273 form the BC loop and 322-332 form the FG loop. Also provided are exemplary constant regions for human IgG4 heavy (S228P mutant) and light (kappa) chains (SEQ ID NOs: 931-932) and murine IgG2A (LALAPG and LALA mutants) (SEQ ID NOs: 933-934). In some embodiments, any one or more of the VH/VL and/or CDRs provided in the other figures or otherwise disclosed herein can be paired with any one or more of the exemplary constant regions provided herein.

[0032] FIG. 14 depicts nucleic acid sequences that encode for exemplary heavy chain variable regions of anti-Gal3 antibodies disclosed herein. In some embodiments, any of the compositions or methods provided herein can include one or more of the heavy chain variable regions encoded by the nucleic acids provided herein.

[0033] FIG. 15 depicts nucleic acid sequences that encode for exemplary light chain variable regions of anti-Gal3 antibodies disclosed herein. In some embodiments, any of the compositions or methods provided herein can include one or more of the light chain variable regions encoded by the nucleic acids provided herein.

[0034] FIG. 16 depicts nucleic acid sequences that encode for exemplary heavy chains of anti-Gal3 antibodies disclosed herein. In some embodiments, any of the compositions or methods provided herein can include one or more of the heavy chains encoded by the nucleic acids provided herein.

[0035] FIG. 17 depicts nucleic acid sequences that encode for exemplary light chains of anti-Gal3 antibodies disclosed herein. In some embodiments, any of the compositions or methods provided herein can include one or more of the light chains encoded by the nucleic acids provided herein.

[0036] FIGS. 18A-B depicts an exemplary alignment for the heavy chain CDRs (FIG. 18A) and light chain CDRs (FIG. 18B) for the exemplary anti-Gal3 antibodies disclosed herein.

[0037] FIGS. 19A-D each depict a table with a subset of anti-Gal3 antibodies disclosed herein. In some embodiments, sequences, including heavy chain variable region CDRs, light chain variable region CDRs, heavy chain variable regions, light chain variable regions, heavy chains, and light chains, or combinations thereof, can be selected from any one or more of the anti-Gal3 antibodies provided as subsets in each table.

[0038] FIGS. 20A-D each depict a table with a subset of anti-Gal3 antibodies disclosed herein. In some embodiments, sequences, including heavy chain variable region CDRs, light chain variable region CDRs, heavy chain variable regions, light chain variable regions, heavy chains, and light chains, or combinations thereof, can be selected from any one or more of the anti-Gal3 antibodies provided as subsets in each table.

[0039] FIGS. 21A-B depict quantification of locomotor activity in an intracerebral hemorrhage (ICH) stroke mouse model showing significantly shorter latency to fall (FIG. 21A) and less distance travelled (FIG. 21B) as compared to age matched healthy control mice.

[0040] FIG. 22 depicts an exemplary dose regimen after inducing stroke (ICH). Mice were dosed with 8 doses of mTB001 or MOPC21 for 4 weeks (2 doses per week).

[0041] FIGS. 23A-D depict quantification of locomotor activity in an ICH mouse model before and after treatment with mTB001 or MOPC21 and compared to control wild-type. Treated mice were assessed after 4 (FIG. 23A), 6 (FIG. 23B), and 8 doses. After 8 doses of treatment, stroke-induced mice treated with mTB001 showed significant improvement in terms of latency to fall (FIG. 23C) and distance travelled (FIG. 23D), with locomotor ability similar to age matched healthy control mice.

[0042] FIGS. 24A-C depict reduction in microhemorrhage in ICH model mice treated with mTB001 as quantified by Prussian Blue staining. Representative Prussian Blue-stained brain slices of mTB001-treated mice showed significantly reduced microhemorrhage compared to MOPC21-treated mice (FIG. 24A). Healthy control mice showed no microhemorrhage (FIG. 24B). FIG. 24C is the quantification of Prussian Blue-positive surface area of the representative brain slices of FIGS. 24A-B.

[0043] FIGS. 25A-B depict a reduction of activated microglia in ICH model mice treated with mTB001. FIG. 25A shows brain slices of mTB001 or MOPC21 isotype control treated ICH mice and wild type control mice stained with the microglia marker Iba1. FIG. 25B is the quantification of Iba1 positive staining of the representative brain slices of FIG. 24A.

[0044] FIGS. 26A-B depict a reduction of activated astrocytes in ICH model mice treated with mTB001. FIG. 26A shows brain slices of mTB001 or MOPC21 isotype control treated ICH mice and wild type control mice stained with the astrocyte marker GFAP. FIG. 26B is the quantification of GFAP positive staining of the representative brain slices of FIG. 26A.

[0045] FIGS. 27A-F depict a mouse model of TBI treated with exemplary anti-Gal3 antibody mTB001 exhibiting reduced levels of activated microglia and astrocytes, and levels of myeloid immune cells in the affected brain. The brains of TBI model and wild type mice were probed with antibodies against the activated microglia marker Iba1 (FIG. 27A), the activated astrocyte marker GFAP (FIG. 27C), and the myeloid cell marker CD68 (FIG. 27E). FIG. 27B shows quantification of FIG. 27A showing that mTB001 significantly reduces activated microglia compared to isotype control. FIG. 27D shows quantification of FIG. 27C showing that mTB001 significantly reduces activated astrocytes compared to isotype control. FIG. 27F shows quantification of FIG. 27E showing that mTB001 significantly reduces levels of myeloid cells, such as macrophages and microglia, compared to isotype control.

[0046] FIGS. 28A-D depict a mouse model of TBI treated with exemplary anti-Gal3 antibody mTB001 exhibiting reduced levels of hyperphosphorylated tau and microhemorrhage in the affected brain. The brains of TBI model and wild type mice were probed with antibody AT8, which binds to phosphorylated tau (FIG. 28A), or stained with Prussian Blue (FIG. 28C). FIG. 28B shows quantification of FIG. 28A showing that mTB001 significantly reduces levels of hyperphosphorylated tau compared to isotype control. FIG. 28D shows quantification of FIG. 28C showing that mTB001 significantly reduces microhemorrhage compared to isotype control.

[0047] FIG. 28E depicts a mouse model of TBI treated with exemplary antibody mTB001 exhibiting reduced levels of neurofilament-light (NF-L) in plasma after 48 hours of treatment.

[0048] FIG. 29 depicts exemplary anti-Gal3 antibodies assessed for activity against fibrin oligomerization of Example 3.

[0049] FIGS. 30A-B depict a time course of Gal3-mediated fibrin oligomerization over a course of 0-5 hours. FIG. 30A shows a dot blot of fibrin incubated with or without Gal3 (100 ng/mL each) for 0-5 hours and probed with oligomer specific conformational antibody A11. FIG. 30B shows quantification of FIG. 30A.

[0050] FIGS. 31A-B depict a time course of Gal3-mediated fibrin oligomerization over a course of 0-24 hours. FIG. 31A shows a dot blot of fibrin incubated with or without Gal3 (100 µg/mL each) for 0-24 hours and probed with oligomer specific conformational antibody A11. FIG. 31B shows quantification of FIG. 31A.

[0051] FIG. 32 depicts the ability for exemplary anti-Gal3 antibodies TB001 and TB006 to degrade fibrin oligomers. 100 µg/mL each of fibrin and Gal3 were incubated for 24 hours prior to the addition of Gal3 antibodies at a concentration of 0, 3, 10, or 100 µg/mL and incubated for 3 hours. Dot blot of samples were probed with A11 antibody. Degradation of fibrin oligomers were observed at all tested concentrations of antibody.

[0052] FIGS. 33A-C depict the ability for additional exemplary anti-Gal3 antibodies to degrade fibrin oligomers. FIG. 33A shows a time course of fibrin aggregation in a dot blot with samples of 100 µg/mL each of fibrin and Gal3 incubated for 0, 2, 4, 6, or 24 hours and probed with A11 antibody. FIG. 33B shows a dot blot showing degradation of fibrin oligomers by exemplary anti-Gal3 antibodies as listed according to assigned numbers shown in FIG. 29. 100 µg/mL each of fibrin and Gal3 were incubated for 24 hours prior to the addition of 100 µg/mL of the listed anti-Gal3 antibody clones. Antibody incubation was done for 24 hours, and samples were probed on a dot blot with A11 antibody. Dot blot was done in duplicate for each condition. FIG. 33C shows quantification of FIGS. 33A-B (24 hour time point for fibrin or fibrin/Gal3 only; and 24 hour fibrin/Gal3 incubation + 24 hour antibody incubation [one of the two duplicates of FIG. 33B was quantified]).

[0053] FIG. 34 depicts Gal3 induction of cytokine release by activated neutrophils (using an HL60 neutrophil-like cell line model) and inhibition of this effect by anti-Gal3 antibodies. Expression of TNF-α, IL-6, and IL-8 was measured by ELISA.

[0054] FIGS. 35A-C depict Gal3 induction of cytokine release by activated monocytes (using a THP-1 monocyte-like cell line model) and inhibition of this effect by anti-Gal3 antibodies. After 6 or 24 hours of cell incubation, expression of TNF-α (FIG. 35A), IL-6 (FIG. 35B), and IL-8 (FIG. 35C) was measured by ELISA. No expression of IL-6 was observed at the 6 hour time point.

[0055] FIG. 36 depicts an exemplary administration and follow up schema for the acute ischemic stroke (AIS) treatment using TB006 as described in Example 12.

### DETAILED DESCRIPTION OF THE DISCLOSURE

[0056] Galectin-3 (Gal3, GAL3) plays a role in cell proliferation, adhesion, differentiation, angiogenesis, and apoptosis. This activity is, at least in part, due to immunomodulatory properties and binding affinity towards other immune regulatory proteins, signaling proteins, and other cell surface markers.

[0057] Gal3 functions by distinct N-terminal and C-terminal domains. The N-terminal domain (isoform 1: amino acids 1-111, isoform 3: amino acids 1-125) comprise a tandem repeat domain (TRD, isoform 1: amino acids 36-109, isoform 3: amino acids 50-123) and is largely responsible for oligomerization of Gal3. The C-terminal domain (isoform 1: amino acids 112-250, isoform 3: amino acids 126-264) comprise a carbohydrate-recognition-binding domain (CRD), which binds to β-galactosides.

[0058] An exemplary sequence for isoform 1 of human Gal3 (NCBI Reference No. NP_002297.2) is shown in SEQ ID NO: 1. An exemplary sequence for isoform 3 of human Gal3 (NCBI Reference No. NP_001344607.1) is shown in SEQ ID NO: 2.

[0059] Disclosed herein are methods for inhibiting, reducing, preventing, and/or treating stroke in a subject in need thereof. The methods comprise administering an anti-Gal3 antibody or binding fragment thereof to the subject, thereby inhibiting, reducing, preventing, and/or treating the stroke. In some embodiments, the stroke is an ischemic stroke, thrombotic stroke, embolic stroke, transient ischemic attack, hemorrhagic stroke, intracerebral hemorrhage, or subarachnoid hemorrhage.

[0060] Also disclosed herein are methods for inhibiting, reducing, preventing, and/or treating traumatic brain injury (TBI) in a subject in need thereof. The methods comprise administering an anti-Gal3 antibody or binding fragment thereof to the subject, thereby inhibiting, reducing, preventing, and/or treating the TBI. In some embodiments, the TBI is associated with a concussion, edema, diffuse axonal injury, spinal cord injury, coma, neuroinflammation, microhemorrhage, astrocytosis, activated microglia, and/or hematoma.

[0061] Also disclosed herein are methods for inhibiting, reducing, preventing, and/or treating a disorder associated with fibrin activity or dysfunction in a subject in need thereof. The methods comprise administering an anti-Gal3 antibody or binding fragment thereof to the subject, thereby inhibiting, reducing, preventing, and/or treating the disorder associated with fibrin activity or dysfunction. In some embodiments, the disorder associated with fibrin activity or dysfunction comprises atherosclerosis, thrombosis, thromboembolism, carotid artery disease, coronary artery disease, peripheral artery disease, myocardial infarction, heart failure, heart attack, hypertension, chronic kidney disease, coagulopathy, or thrombocytopathy.

[0062] Any and all of the methods provide herein are also contemplated for use in the preparation of a medicament for the treatment of the noted disorder and/or as the corresponding composition for use in the treatment of the noted disorder.

[0063] In some embodiments, the anti-Gal3 antibody or binding fragment is any one or more of the anti-Gal3 antibodies or binding fragments thereof, or any portion or component of any one or more of the anti-Gal3 antibodies or binding fragments thereof disclosed herein, including but not limited to 1, 2, 3, 4, 5, or 6 CDRs, heavy chain variable regions, light chain variable regions, heavy chains, or light chains.

[0064] In some embodiments, the anti-Gal3 antibody or binding fragment thereof is or comprises any one or more of the sequences illustrated in FIGS. 3A-C, 4A-C, 5, 6, 7, 8, or 9, includes any 1, 2, 3, 4, 5, or 6 of the CDRs in SEQ ID NOs: 27-538, 801-865, and/or includes one or both of the VH/VL in SEQ ID NOs: 297-447, 803-865, 926-929. In some embodiments, the anti-Gal3 antibody or binding fragment thereof includes 1, 2, 3, 4, 5, or 6 of the V_{H}-CDR1, V_{H}-CDR2, V_{H}-CDR3, V_{L}-CDR1, V_{L}-CDR2, and/or V_{L}-CDR3 of SEQ ID NOs: 27, 71, 112, 170, 221, 248. In some embodiments, the anti-Gal3 antibody or binding fragment thereof includes 1, 2, 3, 4, 5, or 6 of the V_{H}-CDR1, V_{H}-CDR2, V_{H}-CDR3, V_{L}-CDR1, V_{L}-CDR2, and/or V_{L}-CDR3 of SEQ ID NOs: 31, 72, 113, 171, 222, 249. In some embodiments, the anti-Gal3 antibody or binding fragment thereof includes 1, 2, 3, 4, 5, or 6 of the V_{H}-CDR1, V_{H}-CDR2, V_{H}-CDR3, V_{L}-CDR1, V_{L}-CDR2, and/or V_{L}-CDR3 of SEQ ID NOs: 30, 86, 130, 189, 230, 263. In some embodiments, the anti-Gal3 antibody or binding fragment thereof includes 1, 2, 3, 4, 5, or 6 of the V_{H}-CDR1, V_{H}-CDR2, V_{H}-CDR3, V_{L}-CDR1, V_{L}-CDR2, and/or V_{L}-CDR3 of SEQ ID NOs: 34, 74, 116, 174, 225, 252. In some embodiments, the anti-Gal3 antibody or binding fragment thereof includes 1, 2, 3, 4, 5, or 6 of the V_{H}-CDR1, V_{H}-CDR2, V_{H}-CDR3, V_{L}-CDR1, V_{L}-CDR2, and/or V_{L}-CDR3 of SEQ ID NOs: 32, 84, 119, 186, 228, 255. In some embodiments, the anti-Gal3 antibody or binding fragment thereof includes 1, 2, 3, 4, 5, or 6 of the V_{H}-CDR1, V_{H}-CDR2, V_{H}-CDR3, V_{L}-CDR1, V_{L}-CDR2, and/or V_{L}-CDR3 of SEQ ID NOs: 37, 77, 118, 178, 229, 256. In some embodiments, the anti-Gal3 antibody or binding fragment thereof includes 1, 2, 3, 4, 5, or 6 of the V_{H}-CDR1, V_{H}-CDR2, V_{H}-CDR3, V_{L}-CDR1, V_{L}-CDR2, and/or V_{L}-CDR3 of SEQ ID NOs: 34, 74, 126, 187, 225, 252. In some embodiments, the anti-Gal3 antibody or binding fragment thereof includes 1, 2, 3, 4, 5, or 6 of the V_{H}-CDR1, V_{H}-CDR2, V_{H}-CDR3, V_{L}-CDR1, V_{L}-CDR2, and/or V_{L}-CDR3 of SEQ ID NOs: 66, 108, 164, 215, 225, 291.

### Definitions

[0065] In the following detailed description, reference is made to the accompanying drawings, which form a part hereof. In the drawings, similar symbols typically identify similar components, unless context dictates otherwise. The illustrative embodiments described in the detailed description, drawings, and claims are not meant to be limiting. Other embodiments may be utilized, and other changes may be made, without departing from the spirit or scope of the subject matter presented herein. It will be readily understood that the aspects of the present disclosure, as generally described herein, and illustrated in the Figures, can be arranged, substituted, combined, separated, and designed in a wide variety of different configurations, all of which are explicitly contemplated herein.

[0066] Unless defined otherwise, all technical and scientific terms used herein have the same meaning as is commonly understood by one of skill in the art to which the claimed subject matter belongs. It is to be understood that the foregoing general description and the following detailed description are exemplary and explanatory only and are not restrictive of any subject matter claimed.

[0067] The section headings used herein are for organizational purposes only and are not to be construed as limiting the subject matter described.

[0068] In this application, the use of the singular includes the plural unless specifically stated otherwise. It must be noted that, as used in the specification and the appended claims, the singular forms “a,” “an” and “the” include plural referents unless the context clearly dictates otherwise. In this application, the use of “or” means “and/or” unless stated otherwise. Furthermore, use of the term “including” as well as other forms, such as “include”, “includes,” and “included,” is not limiting.

[0069] By “about” is meant a quantity, level, value, number, frequency, percentage, dimension, size, amount, weight or length that varies by as much as 30, 25, 20, 15, 10, 9, 8, 7, 6, 5, 4, 3, 2 or 1% to a reference quantity, level, value, number, frequency, percentage, dimension, size, amount, weight or length.

[0070] Throughout this specification, unless the context requires otherwise, the words “comprise,” “comprises,” and “comprising” will be understood to imply the inclusion of a stated step or element or group of steps or elements but not the exclusion of any other step or element or group of steps or elements. By “consisting of is meant including, and limited to, whatever follows the phrase “consisting of.” Thus, the phrase “consisting of” indicates that the listed elements are required or mandatory, and that no other elements may be present. By “consisting essentially of” is meant including any elements listed after the phrase and limited to other elements that do not interfere with or contribute to the activity or action specified in the disclosure for the listed elements. Thus, the phrase “consisting essentially of” indicates that the listed elements are required or mandatory, but that other elements are optional and may or may not be present depending upon whether or not they materially affect the activity or action of the listed elements.

[0071] As used herein, the terms “individual(s)”, “subject(s)” and “patient(s)” mean any mammal. In some embodiments, the mammal is a human. In some embodiments, the mammal is a non-human. None of the terms require or are limited to situations characterized by the supervision (e.g. constant or intermittent) of a health care worker (e.g. a doctor, a registered nurse, a nurse practitioner, a physician’s assistant, an orderly or a hospice worker).

[0072] The terms “polypeptide”, “peptide”, and “protein” are used interchangeably herein to refer to polymers of amino acids of any length. The polymer may be linear, cyclic, or branched, it may comprise modified amino acids, and it may be interrupted by non-amino acids. The terms also encompass amino acid polymers that have been modified, for example, via sulfation, glycosylation, lipidation, acetylation, phosphorylation, iodination, methylation, oxidation, proteolytic processing, phosphorylation, prenylation, racemization, selenoylation, transfer-RNA mediated addition of amino acids to proteins such as arginylation, ubiquitination, or any other manipulation, such as conjugation with a labeling component.

[0073] As used herein the term “amino acid” refers to either natural and/or unnatural or synthetic amino acids, including glycine and both the D or L optical isomers, and amino acid analogs and peptidomimetics.

[0074] A polypeptide or amino acid sequence “derived from” a designated protein refers to the origin of the polypeptide. Preferably, the polypeptide has an amino acid sequence that is essentially identical to that of a polypeptide encoded in the sequence, or a portion thereof wherein the portion consists of at least 10-20 amino acids, or at least 20-30 amino acids, or at least 30-50 amino acids, or which is immunologically identifiable with a polypeptide encoded in the sequence. This terminology also includes a polypeptide expressed from a designated nucleic acid sequence.

[0075] As used herein, the term “antibody” denotes the meaning ascribed to it by one of skill in the art, and further it is intended to include any polypeptide chain-containing molecular structure with a specific shape that fits to and recognizes an epitope, where one or more non-covalent binding interactions stabilize the complex between the molecular structure and the epitope. Antibodies may be polyclonal antibodies, although monoclonal antibodies may be preferred because they may be reproduced by cell culture or recombinantly and can be modified to reduce their antigenicity.

[0076] In addition to entire immunoglobulins (or their recombinant counterparts), immunoglobulin fragments or “binding fragments” comprising the epitope binding site (e.g., Fab′, F(ab′)₂, single-chain variable fragment (scFv), diabody, minibody, nanobody, single-domain antibody (sdAb), or other fragments) are useful as antibody moieties in the present invention. Such antibody fragments may be generated from whole immunoglobulins by ricin, pepsin, papain, or other protease cleavage. Minimal immunoglobulins may be designed utilizing recombinant immunoglobulin techniques. For instance “Fv” immunoglobulins for use in the present invention may be produced by linking a variable light chain region to a variable heavy chain region via a peptide linker (e.g., poly-glycine or another sequence which does not form an alpha helix or beta sheet motif). Nanobodies or single-domain antibodies can also be derived from alternative organisms, such as dromedaries, camels, llamas, alpacas, or sharks. In some embodiments, antibodies can be conjugates, e.g. pegylated antibodies, drug, radioisotope, or toxin conjugates. Monoclonal antibodies directed against a specific epitope, or combination of epitopes, will allow for the targeting and/or depletion of cellular populations expressing the marker. Various techniques can be utilized using monoclonal antibodies to screen for cellular populations expressing the marker(s), and include magnetic separation using antibody-coated magnetic beads, “panning” with antibody attached to a solid matrix (i.e., plate), and flow cytometry (e.g. U.S. Pat. No. 5,985,660, hereby expressly incorporated by reference in its entirety).

[0077] As known in the art, the term “Fc region” is used to define a C-terminal region of an immunoglobulin heavy chain. The “Fc region” may be a native sequence Fc region or a variant Fc region. Although the boundaries of the Fc region of an immunoglobulin heavy chain might vary, the human IgG heavy chain Fc region is usually defined to stretch from an amino acid residue at position Cys226, or from Pro230, to the carboxyl-terminus thereof. The numbering of the residues in the Fc region is that of the EU index as in Kabat. Kabat et al., Sequences of Proteins of Immunological Interest, 5th Ed. Public Health Service, National Institutes of Health, Bethesda, Md., 1991. The Fc region of an immunoglobulin generally comprises two constant domains, CH2 and CH3. As is known in the art, an Fc region can be present in dimer or monomeric form.

[0078] As known in the art, a “constant region” of an antibody refers to the constant region of the antibody light chain or the constant region of the antibody heavy chain, either alone or in combination.

[0079] A “variable region” of an antibody refers to the variable region of the antibody light chain or the variable region of the antibody heavy chain, either alone or in combination. As known in the art, the variable regions of the heavy and light chains each consist of four framework regions (FRs) connected by three complementarity determining regions (CDRs) also known as hypervariable regions, and contribute to the formation of the antigen binding site of antibodies. If variants of a subject variable region are desired, particularly with substitution in amino acid residues outside of a CDR region (i.e., in the framework region), appropriate amino acid substitution, preferably, conservative amino acid substitution, can be identified by comparing the subject variable region to the variable regions of other antibodies which contain CDR1 and CDR2 sequences in the same canonical class as the subject variable region (Chothia and Lesk, J Mol Biol 196(4): 901-917, 1987).

[0080] In some embodiments, definitive delineation of a CDR and identification of residues comprising the binding site of an antibody is accomplished by solving the structure of the antibody and/or solving the structure of the antibody-ligand complex. In certain embodiments, that can be accomplished by any of a variety of techniques known to those skilled in the art, such as X-ray crystallography. In certain embodiments, various methods of analysis can be employed to identify or approximate the CDR regions. In certain embodiments, various methods of analysis can be employed to identify or approximate the CDR regions. Examples of such methods include, but are not limited to, the Kabat definition, the Chothia definition, the IMGT approach (Lefranc et al., 2003, Dev Comp Immunol. 27:55-77), computational programs such as Paratome (Kunik et al., 2012, Nucl Acids Res. W521-4), the AbM definition, and the conformational definition.

[0081] The Kabat definition is a standard for numbering the residues in an antibody and is typically used to identify CDR regions. See, e.g., Johnson & Wu, 2000, Nucleic Acids Res., 28: 214-8. The Chothia definition is similar to the Kabat definition, but the Chothia definition takes into account positions of certain structural loop regions. See, e.g., Chothia et al., 1986, J. Mol. Biol., 196: 901-17; Chothia et al., 1989, Nature, 342: 877-83. The AbM definition uses an integrated suite of computer programs produced by Oxford Molecular Group that model antibody structure. See, e.g., Martin et al., 1989, Proc Natl Acad Sci (USA), 86:9268-9272; “AbM.TM., A Computer Program for Modeling Variable Regions of Antibodies,” Oxford, UK; Oxford Molecular, Ltd. The AbM definition models the tertiary structure of an antibody from primary sequence using a combination of knowledge databases and ab initio methods, such as those described by Samudrala et al., 1999, “Ab Initio Protein Structure Prediction Using a Combined Hierarchical Approach,” in PROTEINS, Structure, Function and Genetics Suppl., 3:194-198. The contact definition is based on an analysis of the available complex crystal structures. See, e.g., MacCallum et al., 1996, J. Mol. Biol., 5:732-45. In another approach, referred to herein as the “conformational definition” of CDRs, the positions of the CDRs may be identified as the residues that make enthalpic contributions to antigen binding. See, e.g., Makabe et al., 2008, Journal of Biological Chemistry, 283:1156-1166. Still other CDR boundary definitions may not strictly follow one of the above approaches, but will nonetheless overlap with at least a portion of the Kabat CDRs, although they may be shortened or lengthened in light of prediction or experimental findings that particular residues or groups of residues do not significantly impact antigen binding. As used herein, a CDR may refer to CDRs defined by any approach known in the art, including combinations of approaches. The methods used herein may utilize CDRs defined according to any of these approaches. For any given embodiment containing more than one CDR, the CDRs may be defined in accordance with any of Kabat, Chothia, extended, IMGT, Paratome, AbM, and/or conformational definitions, or a combination of any of the foregoing.

[0082] As disclosed herein, sequences having a % identity to any of the sequences disclosed herein are envisioned and may be used. The terms “% identity” refer to the percentage of units (i.e. amino acids or nucleotides) that are the same between two or more sequences relative to the length of the sequence. When the two or more sequences being compared are the same length, the % identity will be respective that length. When two or more sequences being compared are different lengths, deletions and/or insertions may be introduced to obtain the best alignment. In some embodiments, these sequences may include peptide sequences, nucleic acid sequences, CDR sequences, variable region sequences, or heavy or light chain sequences. In some embodiments, any sequence having at least 80%, 81%, 82%, 83%, 84%, 85%, 86%, 87%, 88%, 89%, 90%, 91%, 92%, 93%, 94%, 95%, 96%, 97%, 98%, 99%, or 100% sequence identity to any of the sequences disclosed herein may be used. In some embodiments, any sequence having at least 0, 1, 2, 3, 4, 5, 6, 7, 8, 9, 10, 11, 12, 13, 14, 15, 16, 17, 18, 19, 20, 21, 22, 23, 24, 25, 26, 27, 28, 29, 30, 31, 32, 33, 34, 35, 36, 37, 38, 39, 40, 41, 42, 43, 44, 45, 46, 47, 48, 49, or 50 substitutions, deletions, or additions relative to any of the sequences disclosed herein may be used. The changes in sequences may apply to, for example, single amino acids, single nucleic acid bases, or nucleic acid codons; however, differences in longer stretches of sequences are also envisioned. As applied to antibody sequences, these differences in sequences may apply to antigen-binding regions (e.g., CDRs) or regions that do not bind to antigens or are only secondary to antigen binding (e.g., framework regions).

[0083] As disclosed herein, sequences having a % homology to any of the sequences disclosed herein are envisioned and may be used. The term “% homology” refers to the degree of conservation between two sequences when considering their three-dimensional structure. For example, homology between two protein sequences may be dependent on structural motifs, such as beta strands, alpha helices, and other folds, as well as their distribution throughout the sequence. Homology may be determined through structural determination, either empirically or in silico. In some embodiments, any sequence having at least 80%, 81%, 82%, 83%, 84%, 85%, 86%, 87%, 88%, 89%, 90%, 91%, 92%, 93%, 94%, 95%, 96%, 97%, 98%, 99%, or 100% sequence homology to any of the sequences disclosed herein may be used. In some embodiments, any sequence having at least 0, 1, 2, 3, 4, 5, 6, 7, 8, 9, 10, 11, 12, 13, 14, 15, 16, 17, 18, 19, 20, 21, 22, 23, 24, 25, 26, 27, 28, 29, 30, 31, 32, 33, 34, 35, 36, 37, 38, 39, 40, 41, 42, 43, 44, 45, 46, 47, 48, 49, or 50 substitutions, deletions, or additions relative to any of the sequences disclosed herein, which may or may not affect the overall % homology, may be used.

[0084] As applied herein, sequences having a certain % similarity to any of the sequence disclosed herein are envisioned and may be used. In some embodiments, these sequences may include peptide sequences, nucleic acid sequences, CDR sequences, variable region sequences, or heavy or light chain sequences. As understood in the art with respect to peptide sequences, “similarity” refers to the comparison of amino acids based on their properties, including but not limited to size, polarity, charge, pK, aromaticity, hydrogen bonding properties, or presence of functional groups (e.g. hydroxyl, thiol, amine, carboxyl, and the like). The term “% similarity” refers to the percentage of units (i.e. amino acids) that are the same between two or more sequences relative to the length of the sequence. When the two or more sequences being compared are the same length, the % similarity will be respective that length. When two or more sequences being compared are different lengths, deletions and/or insertions may be introduced to obtain the best alignment. The similarity of two amino acids may dictate whether a certain substitution is conservative or non-conservative. Methods of determining the conservativeness of an amino acid substitution are generally known in the art and may involve substitution matrices. Commonly used substitution matrices include BLOSUM45, BLOSUM62, BLOSUM80, PAM100, PAM120, PAM160, PAM200, PAM250, but other substitution matrices or approaches may be used as considered appropriate by the skilled person. A certain substitution matrix may be preferential over the others when considering aspects such as stringency, conservation and/or divergence of related sequences (e.g. within the same species or broader), and length of the sequences in question. As used herein, a peptide sequence having a certain % similarity to another sequence will have up to that % of amino acids that are either identical or an acceptable substitution as governed by the method of similarity determination used. In some embodiments, a sequence having at least 80%, 81%, 82%, 83%, 84%, 85%, 86%, 87%, 88%, 89%, 90%, 91%, 92%, 93%, 94%, 95%, 96%, 97%, 98%, 99%, or 100% sequence similarity to any of the sequences disclosed herein may be used. In some embodiments, any sequence having at least 0, 1, 2, 3, 4, 5, 6, 7, 8, 9, 10, 11, 12, 13, 14, 15, 16, 17, 18, 19, 20, 21, 22, 23, 24, 25, 26, 27, 28, 29, 30, 31, 32, 33, 34, 35, 36, 37, 38, 39, 40, 41, 42, 43, 44, 45, 46, 47, 48, 49, or 50 similar substitutions relative to any of the sequences disclosed herein may be used. As applied to antibody sequences, these similar substitutions may apply to antigen-binding regions (i.e. CDRs) or regions that do not bind to antigens or are only secondary to antigen binding (i.e. framework regions).

[0085] The term “consensus sequence” as used herein with regard to sequences refers to the generalized sequence representing all of the different combinations of permissible amino acids at each location of a group of sequences. A consensus sequence may provide insight into the conserved regions of related sequences where the unit (e.g. amino acid or nucleotide) is the same in most or all of the sequences, and regions that exhibit divergence between sequences. In the case of antibodies, the consensus sequence of a CDR may indicate amino acids that are important or dispensable for antigen binding. It is envisioned that consensus sequences may be prepared with any of the sequences provided herein, and the resultant various sequences derived from the consensus sequence can be validated to have similar effects as the template sequences.

[0086] The term “compete,” as used herein with regard to an antibody, means that a first antibody, or an antigen-binding portion thereof, binds to an epitope in a manner sufficiently similar to the binding of a second antibody, or an antigen-binding portion thereof, such that the result of binding of the first antibody with its cognate epitope is detectably decreased in the presence of the second antibody compared to the binding of the first antibody in the absence of the second antibody. The alternative, where the binding of the second antibody to its epitope is also detectably decreased in the presence of the first antibody, can, but need not be the case. That is, a first antibody can inhibit the binding of a second antibody to its epitope without that second antibody inhibiting the binding of the first antibody to its respective epitope. However, where each antibody detectably inhibits the binding of the other antibody with its cognate epitope or ligand, whether to the same, greater, or lesser extent, the antibodies are said to “cross-compete” with each other for binding of their respective epitope(s). Both competing and cross-competing antibodies are encompassed by the present invention. Regardless of the mechanism by which such competition or cross-competition occurs (e.g., steric hindrance, conformational change, or binding to a common epitope, or portion thereof), the skilled artisan would appreciate, based upon the teachings provided herein, that such competing and/or cross-competing antibodies are encompassed and can be useful for the methods disclosed herein.

[0087] An antibody that “preferentially binds” or “specifically binds” (used interchangeably herein) to an epitope is a term well understood in the art, and methods to determine such specific or preferential binding are also well known in the art. A molecule is said to exhibit “specific binding” or “preferential binding” if it reacts or associates more frequently, and/or more rapidly, and/or with greater duration and/or with greater affinity with a particular cell or substance than it does with alternative cells or substances. An antibody “specifically binds” or “preferentially binds” to a target if it binds with greater affinity, and/or avidity, and/or more readily, and/or with greater duration than it binds to other substances. For example, an antibody that specifically or preferentially binds to a target epitope is an antibody that binds this epitope with greater affinity, and/or avidity, and/or more readily, and/or with greater duration than it binds to other target epitopes or non-target epitopes. It is also understood by reading this definition that, for example, an antibody (or moiety or epitope) that specifically or preferentially binds to a first target may or may not specifically or preferentially bind to a second target. As such, “specific binding” or “preferential binding” does not necessarily require (although it can include) exclusive binding. Generally, but not necessarily, reference to binding means preferential binding.

[0088] The term “block” or “disrupt” as used herein with regard to an antibody refers to the ability of an antibody to interfere with a biological process, including but not limited to activity of an enzyme, binding of two or more biological molecules (e.g. two or more proteins, peptides, nucleic acids, lipids, and the like), or advancement of a signaling cascade. Generally, interference with a biological process will involve the antibody binding to its target or an epitope thereof, thereby interfering with the normal function of said target, such as occluding an active site of the target, occluding another region of the target important for its function, or altering the localization and/or transport of the target. The blocking or disruption activity of an antibody may be quantified in terms of the reduction of the biological process in question relative to a control condition where the biological process is not disrupted. In other cases, the blocking or disruption activity of an antibody may be quantified in terms of a modulation in another biological process known to be associated with the target biological process, whether it be directly related or inversely related. In some embodiments, the blocking or disruption activity may cause a change of at least 5%, 10%, 20%, 30%, 40%, 50%, 60%, 70%, 80%, 90%, or 100%, or any percentage within a range defined by any two of the aforementioned values, relative to a control condition. In some embodiments provided herein, an interaction between Gal3 and fibrin is a biological process that can be disrupted by an anti-Gal3 antibody. It is envisioned that the interaction between Gal3 and fibrin may or may not be a direct interaction between Gal3 and fibrin, and the anti-Gal3 antibody may interfere with some other aspect of the activity of Gal3 and/or fibrin.

[0089] As used herein, the term “antigen binding molecule” refers to a molecule that comprises an antigen binding portion that binds to an antigen and, optionally, a scaffold or framework portion that allows the antigen binding portion to adopt a conformation that promotes binding of the antigen binding portion or provides some additional properties to the antigen binding molecule. In some embodiments, the antigen is Gal3. In some embodiments, the antigen binding portion comprises at least one CDR from an antibody that binds to the antigen. In some embodiments, the antigen binding portion comprises all three CDRs from a heavy chain of an antibody that binds to the antigen or from a light chain of an antibody that binds to the antigen. In some embodiments, the antigen binding portion comprises all six CDRs from an antibody that binds to the antigen (three from the heavy chain and three from the light chain). In some embodiments, the antigen binding portion is an antibody fragment.

[0090] Nonlimiting examples of antigen binding molecules include antibodies, antibody fragments (e.g., an antigen binding fragment of an antibody), antibody derivatives, and antibody analogs. Further specific examples include, but are not limited to, a single-chain variable fragment (scFv), a nanobody (e.g. VH domain of camelid heavy chain antibodies; VHH fragment, see Cortez-Retamozo et al., Cancer Research, Vol. 64:2853-57, 2004), a Fab fragment, a Fab′ fragment, a F(ab′)2 fragment, a Fv fragment, a Fd fragment, and a complementarity determining region (CDR) fragment. These molecules can be derived from any mammalian source, such as human, mouse, rat, rabbit, pig, dog, cat, horse, donkey, guinea pig, goat, or camelid. Antibody fragments may compete for binding of a target antigen with an intact antibody and the fragments may be produced by the modification of intact antibodies (e.g. enzymatic or chemical cleavage) or synthesized de novo using recombinant DNA technologies or peptide synthesis. The antigen binding molecule can comprise, for example, an alternative protein scaffold or artificial scaffold with grafted CDRs or CDR derivatives. Such scaffolds include, but are not limited to, antibody-derived scaffolds comprising mutations introduced to, for example, stabilize the three-dimensional structure of the antigen binding molecule as well as wholly synthetic scaffolds comprising, for example, a biocompatible polymer. See, for example, Korndorfer et al., 2003, Proteins: Structure, Function, and Bioinformatics, Volume 53, Issue 1:121-129 (2003); Roque et al., Biotechnol. Prog. 20:639-654 (2004). In addition, peptide antibody mimetics (“PAMs”) can be used, as well as scaffolds based on antibody mimetics utilizing fibronectin components as a scaffold.

[0091] An antigen binding molecule can also include a protein comprising one or more antibody fragments incorporated into a single polypeptide chain or into multiple polypeptide chains. For instance, antigen binding molecule can include, but are not limited to, a diabody (see, e.g., EP 404,097; WO 93/11161; and Hollinger et al., Proc. Natl. Acad. Sci. USA, Vol. 90:6444-6448, 1993); an intrabody; a domain antibody (single VL or VH domain or two or more VH domains joined by a peptide linker; see Ward et al., Nature, Vol. 341:544-546, 1989); a maxibody (2 scFvs fused to Fc region, see Fredericks et al., Protein Engineering, Design & Selection, Vol. 17:95-106, 2004 and Powers et al., Journal of Immunological Methods, Vol. 251:123-135, 2001); a triabody; a tetrabody; a minibody (scFv fused to CH3 domain; see Olafsen et al., Protein Eng Des Sel., Vol.17:315-23, 2004); a peptibody (one or more peptides attached to an Fc region, see WO 00/24782); a linear antibody (a pair of tandem Fd segments, VH-CH1-VH-CH1) which, together with complementary light chain polypeptides, form a pair of antigen binding regions, see Zapata et al., Protein Eng., Vol. 8:1057-1062, 1995); a small modular immunopharmaceutical (see U.S. Pat. Publication No. 20030133939); and immunoglobulin fusion proteins (e.g. IgG-scFv, IgG-Fab, 2scFv-IgG, 4scFv-IgG, VH-IgG, IgG-VH, and Fab-scFv-Fc).

[0092] In certain embodiments, an antigen binding molecule can have, for example, the structure of an immunoglobulin. An “immunoglobulin” is a tetrameric molecule, with each tetramer comprising two identical pairs of polypeptide chains, each pair having one “light” (about 25 kDa) and one “heavy” chain (about 50-70 kDa). The amino-terminal portion of each chain includes a variable region of about 100 to 110 or more amino acids primarily responsible for antigen recognition. The carboxy-terminal portion of each chain defines a constant region primarily responsible for effector function.

[0093] Unless otherwise specified, the complementarity defining regions disclosed herein follow the IMGT definition. In some embodiments, any of the CDRs disclosed herein can instead be interpreted by Kabat, Chothia, or other definitions accepted by those of skill in the art.

[0094] The term “humanized” as applies to a non-human (e.g. rodent or primate) antibodies are hybrid immunoglobulins, immunoglobulin chains or fragments thereof which contain minimal sequence derived from non-human immunoglobulin.

[0095] As used herein, the term “cytokine” refers to small proteins, polypeptides, or peptides that are involved in inflammatory signaling or proteins released by one cell population that act on another cell as intercellular mediators or have an autocrine effect on the cells producing the proteins. Cytokines include but are not limited to chemokines, interferons, interleukins, lymphokines, monokines, tumor necrosis factors, CCL1, CCl2, CCL3, CCL4, CCL5, CCL6, CCL7, CCL8, CCL9, CCL11, CCL12, CCL13, CCL14, CCL15, CCL16, CCL17, CCL18, CCL19, CCL20, CCL21, CCL22, CCL23, CCL24, CCL25, CCL26, CCL27, CCL28, CXCL1, CXCL2, CXCL3, CXCL4, CXCL5, CXCL6, CXCL7, CXCL8, CXCL9, CXCL10, CXCL11, CXCL12, CXCL13, CXCL14, CXCL15, CXCL16, CXCL17, CX3CL1, XCL1, XCL2, INFα, INFβ, INFγ, IL-1, IL-1α, IL-1β, IL-1Ra, IL-2, IL-3, IL-4, IL-5, IL-6, IL-7, IL-8, IL-9, IL-10, IL-11, IL-12, IL-13, IL-14, IL-15, IL-16, IL-17, IL-17A-F, IL-18, IL-19, IL-20, IL-21, IL-22, IL-23, IL-24, IL-25, IL-26, IL-27, IL-28, IL-29, IL-30, IL-31, IL-32, IL-33, IL-34, IL-35, IL-36, IL-36Ra, IL-36α, IL-36β, IL-36γ, IL-37, IL-38, adesleukin, GM-CSF, TNFα, TNFβ, TNFγ, TGF-I-3 TNFSF4, TNFSF5, TNFSF6, TNFSF7, TNFSF8, TNFSF9, TNFSF10, TNFSF11, TNFSF12, TNFSF13, TNFSF13B, TNFSF14, TNFSF15, TNFSF18, or TNFSF19, leukemia inhibitor factor (LIF), ciliary neurotrophic factor (CNTF), CNTF-like cytokine (CLC), cardiotrophin (CT), Kit ligand (KL), or any combination thereof.

[0096] As used herein, the terms “treating” or “treatment”, and related terms such as “inhibiting”, “reducing”, and “preventing”, (and as well understood in the art) means an approach for obtaining beneficial or desired results in a subject’s condition, including clinical results. Beneficial or desired clinical results can include, but are not limited to, alleviation or amelioration of one or more symptoms or conditions, diminishment of the extent of a disease, stabilizing (i.e., not worsening) the state of disease, prevention of a disease’s transmission or spread, delaying or slowing of disease progression, amelioration or palliation of the disease state, diminishment of the reoccurrence of disease, and remission, whether partial or total and whether detectable or undetectable. As provided herein, “preventing” may include one or more of “inhibiting” or “reducing”. “Treating” and “treatment” as used herein may include a therapeutic treatment (e.g., in response to a current disease state) and/or a prophylactic treatment (e.g. to prevent the occurrence or severity of an anticipated disease state). Treatment methods comprise administering to a subject a therapeutically effective amount of an active agent. The administering step may consist of a single administration or may comprise a series of administrations. The compositions are administered to the subject in an amount and for a duration sufficient to treat the subject. The length of the treatment period depends on a variety of factors, such as the severity of the condition, the age and genetic profile of the subject, the concentration of active agent, the activity of the compositions used in the treatment, or a combination thereof. It will also be appreciated that the effective dosage of an agent used for the treatment or prophylaxis may increase or decrease over the course of a particular treatment or prophylaxis regime. Changes in dosage may result and become apparent by standard diagnostic assays known in the art. In some instances, chronic administration may be required.

[0097] The terms “effective amount” or “effective dose” as used herein have their plain and ordinary meaning as understood in light of the specification, and refer to that amount of a recited composition or compound that results in an observable designated effect. Actual dosage levels of active ingredients in an active composition of the presently disclosed subject matter can be varied so as to administer an amount of the active composition or compound that is effective to achieve the designated response for a particular subject and/or application. The selected dosage level can vary based upon a variety of factors including, but not limited to, the activity of the composition, formulation, route of administration, combination with other drugs or treatments, severity of the condition being treated, and the physical condition and prior medical history of the subject being treated. In some embodiments, a minimal dose is administered, and dose is escalated in the absence of dose-limiting toxicity to a minimally effective amount. Determination and adjustment of an effective dose, as well as evaluation of when and how to make such adjustments, are contemplated herein.

[0098] In some non-limiting embodiments, an effective amount or effective dose of a composition or compound may relate to the amount or dose that provides a significant, measurable, or sufficient therapeutic effect towards the treatment of any one or more of the diseases provided herein, such as cardiovascular diseases, for example, stroke, traumatic brain injury, cerebral amyloid angiopathy, atherosclerosis, myocardial infarction, and/or diseases associated with fibrin activity or dysfunction, or cancers. In some embodiments, the effective amount or effective dose of a composition or compound may treat, ameliorate, or prevent the progression of symptoms of any one or more of the diseases provided herein.

[0099] The term “administering” includes oral administration, topical contact, administration as a suppository, intravenous, intraperitoneal, intramuscular, intralesional, intrathecal, intranasal, or subcutaneous administration, or the implantation of a slow-release device, e.g., a mini-osmotic pump, to a subject. Administration is by any route, including parenteral and transmucosal (e.g., buccal, sublingual, palatal, gingival, nasal, vaginal, rectal, or transdermal). Parenteral administration includes, e.g., intravenous, intramuscular, intra-arteriole, intradermal, subcutaneous, intraperitoneal, intraventricular, and intracranial. Other modes of delivery include, but are not limited to, the use of liposomal formulations, intravenous infusion, transdermal patches, etc. By “co-administer” it is meant that a first compound described herein is administered at the same time, just prior to, or just after the administration of a second compound described herein.

[0100] As used herein, the term “therapeutic target” refers to a gene or gene product that, upon modulation of its activity (e.g., by modulation of expression, biological activity, and the like), can provide for modulation of the disease phenotype. As used throughout, “modulation” is meant to refer to an increase or a decrease in the indicated phenomenon (e.g., modulation of a biological activity refers to an increase in a biological activity or a decrease in a biological activity).

[0101] As used herein, “pharmaceutically acceptable” has its plain and ordinary meaning as understood in light of the specification and refers to carriers, excipients, and/or stabilizers that are nontoxic to the cell or mammal being exposed thereto at the dosages and concentrations employed or that have an acceptable level of toxicity. A “pharmaceutically acceptable” “diluent,” “excipient,” and/or “carrier” as used herein have their plain and ordinary meaning as understood in light of the specification and are intended to include any and all solvents, dispersion media, coatings, antibacterial and antifungal agents, isotonic and absorption delaying agents, and the like, compatible with administration to humans, cats, dogs, or other vertebrate hosts. Typically, a pharmaceutically acceptable diluent, excipient, and/or carrier is a diluent, excipient, and/or carrier approved by a regulatory agency of a Federal, a state government, or other regulatory agency, or listed in the U.S. Pharmacopeia or other generally recognized pharmacopeia for use in animals, including humans as well as non-human mammals, such as cats and dogs. The term diluent, excipient, and/or carrier can refer to a diluent, adjuvant, excipient, or vehicle with which the pharmaceutical formulation is administered. Such pharmaceutical diluent, excipient, and/or carriers can be sterile liquids, such as water and oils, including those of petroleum, animal, vegetable or synthetic origin. Water, saline solutions and aqueous dextrose and glycerol solutions can be employed as liquid diluents, excipients, and/or carriers, particularly for injectable solutions. Suitable pharmaceutical diluents and/or excipients include sugars, starch, glucose, fructose, lactose, sucrose, maltose, gelatin, malt, rice, flour, chalk, silica gel, sodium stearate, glycerol monostearate, talc, salts, sodium chloride, dried skim milk, glycerol, propylene, glycol, water, ethanol and the like. A non-limiting example of a physiologically acceptable carrier is an aqueous pH buffered solution. The physiologically acceptable carrier may also comprise one or more of the following: antioxidants, such as ascorbic acid, low molecular weight (less than about 10 residues) polypeptides, proteins, such as serum albumin, gelatin, immunoglobulins, hydrophilic polymers such as polyvinylpyrrolidone, amino acids, carbohydrates such as glucose, mannose, or dextrins, chelating agents such as EDTA, sugar alcohols such as glycerol, erythritol, threitol, arabitol, xylitol, ribitol, mannitol, sorbitol, galactitol, fucitol, iditol, inositol, isomalt, maltitol, or lactitol, salt-forming counterions such as sodium, and nonionic surfactants such as TWEEN®, polyethylene glycol (PEG), and PLURONICS®. The formulation, if desired, can also contain minor amounts of wetting, bulking, emulsifying agents, or pH buffering agents. These formulations can take the form of solutions, suspensions, emulsion, sustained release formulations and the like. The formulation should suit the mode of administration.

[0102] The term “pharmaceutically acceptable salts” has its plain and ordinary meaning as understood in light of the specification and includes relatively non-toxic, inorganic and organic acid, or base addition salts of compositions or excipients, including without limitation, analgesic agents, therapeutic agents, other materials, and the like. Examples of pharmaceutically acceptable salts include those derived from mineral acids, such as hydrochloric acid and sulfuric acid, and those derived from organic acids, such as ethanesulfonic acid, benzenesulfonic acid, p-toluenesulfonic acid, and the like. Examples of suitable inorganic bases for the formation of salts include the hydroxides, carbonates, and bicarbonates of ammonia, sodium, lithium, potassium, calcium, magnesium, aluminum, zinc, and the like. Salts may also be formed with suitable organic bases, including those that are non-toxic and strong enough to form such salts. For example, the class of such organic bases may include but are not limited to mono-, di-, and trialkylamines, including methylamine, dimethylamine, and triethylamine; mono-, di-, or trihydroxyalkylamines including mono-, di-, and triethanolamine; amino acids, including glycine, arginine and lysine; guanidine; N-methylglucosamine; N-methylglucamine; L-glutamine; N-methylpiperazine; morpholine; ethylenediamine; N-benzylphenethylamine; trihydroxymethyl aminoethane.

[0103] As used herein, a “carrier” refers to a compound, particle, solid, semi-solid, liquid, or diluent that facilitates the passage, delivery and/or incorporation of a compound to cells, tissues and/or bodily organs. For example, without limitation, a lipid nanoparticle (LNP) is a type of carrier that can encapsulate an oligonucleotide to thereby protect the oligonucleotide from degradation during passage through the bloodstream and/or to facilitate delivery to a desired organ, such as to the lungs.

[0104] As used herein, a “diluent” refers to an ingredient in a pharmaceutical composition that lacks pharmacological activity but may be pharmaceutically necessary or desirable. For example, a diluent may be used to increase the bulk of a potent drug whose mass is too small for manufacture and/or administration. It may also be a liquid for the dissolution of a drug to be administered by injection, ingestion or inhalation. A common form of diluent in the art is a buffered aqueous solution such as, without limitation, phosphate buffered saline that mimics the composition of human blood.

[0105] The term “excipient” has its ordinary meaning as understood in light of the specification, and refers to inert substances, compounds, or materials added to a pharmaceutical composition to provide, without limitation, bulk, consistency, stability, binding ability, lubrication, disintegrating ability etc., to the composition. Excipients with desirable properties include but are not limited to preservatives, adjuvants, stabilizers, solvents, buffers, diluents, solubilizing agents, detergents, surfactants, chelating agents, antioxidants, alcohols, ketones, aldehydes, ethylenediaminetetraacetic acid (EDTA), citric acid, salts, sodium chloride, sodium bicarbonate, sodium phosphate, sodium borate, sodium citrate, potassium chloride, potassium phosphate, magnesium sulfate sugars, dextrose, dextran, fructose, mannose, lactose, galactose, sucrose, sorbitol, cellulose, methyl cellulose, hydroxypropyl methyl cellulose (hypromellose), glycerin, polyvinyl alcohol, povidone, propylene glycol, serum, amino acids, polyethylene glycol, polysorbate 20, polysorbate 80, sodium deoxycholate, sodium taurodeoxycholate, magnesium stearate, octylphenol ethoxylate, benzethonium chloride, thimerosal, gelatin, esters, ethers, 2-phenoxyethanol, urea, or vitamins, or any combination thereof. The amount of the excipient may be found in a pharmaceutical composition at a percentage of 0%, 0.1%, 0.2%, 0.3%, 0.4%, 0.5%, 0.6%, 0.7%, 0.8%, 0.9%, 1%, 2%, 3%, 4%, 5%, 6%, 7%, 8%, 9%, 10%, 20%, 30%, 40%, 50%, 60%, 70%, 80%, 90%, 95%, 100% w/w or any percentage by weight in a range defined by any two of the aforementioned numbers.

[0106] Additional excipients with desirable properties include but are not limited to preservatives, adjuvants, stabilizers, solvents, buffers, diluents, solubilizing agents, detergents, surfactants, chelating agents, antioxidants, alcohols, ketones, aldehydes, ethylenediaminetetraacetic acid (EDTA), tris(hydroxymethyl)aminomethane (Tris), citric acid, ascorbic acid, acetic acid, salts, phosphates, citrates, acetates, succinates, chlorides, bicarbonates, borates, sulfates, sodium chloride, sodium bicarbonate, sodium phosphate, sodium borate, sodium citrate, potassium chloride, potassium phosphate, magnesium sulfate sugars, dextrose, dextran 40, fructose, mannose, lactose, trehalose, galactose, sucrose, sorbitol, mannitol, cellulose, serum, amino acids, alanine, arginine, asparagine, aspartic acid, cysteine, glutamine, glutamic acid, glycine, histidine, isoleucine, leucine, lysine, methionine, phenylalanine, proline, serine, threonine, tryptophan, tyrosine, valine, polysorbate 20, polysorbate 40, polysorbate, 60, polysorbate 80, poloxamer, poloxamer 188, sodium deoxycholate, sodium taurodeoxycholate, magnesium stearate, octylphenol ethoxylate, benzethonium chloride, thimerosal, gelatin, esters, ethers, 2-phenoxyethanol, urea, or vitamins, or any combination thereof. Some excipients may be in residual amounts or contaminants from the process of manufacturing, including but not limited to serum, albumin, ovalbumin, antibiotics, inactivating agents, formaldehyde, glutaraldehyde, β-propiolactone, gelatin, cell debris, nucleic acids, peptides, amino acids, or growth medium components or any combination thereof. The amount of the excipient may be found in the formulation at a percentage that is at least 0%, 0. 1%, 0.2%, 0.3%, 0.4%, 0.5%, 0.6%, 0.7%, 0.8%, 0.9%, 1%, 2%, 3%, 4%, 5%, 6%, 7%, 8%, 9%, 10%, 20%, 30%, 40%, 50%, 60%, 70%, 80%, 90%, 95%, 100% w/w or any percentage by weight in a range defined by any two of the aforementioned numbers.

[0107] The term “purity” of any given substance, compound, or material as used herein refers to the actual abundance of the substance, compound, or material relative to the expected abundance. For example, the substance, compound, or material may be at least 80, 85, 90, 91, 92, 93, 94, 95, 96, 97, 98, 99, or 100% pure, including all decimals in between. Purity may be affected by unwanted impurities, including but not limited to side products, isomers, enantiomers, degradation products, solvent, carrier, vehicle, or contaminants, or any combination thereof. Purity can be measured technologies including but not limited to chromatography, liquid chromatography, gas chromatography, spectroscopy, UV-visible spectrometry, infrared spectrometry, mass spectrometry, nuclear magnetic resonance, gravimetry, or titration, or any combination thereof.

[0108] As used herein, the term “standard of care”, “best practice” and “standard therapy” refers to the treatment that is accepted by medical practitioners to be an appropriate, proper, effective, and/or widely used treatment for a certain disease. The standard of care of a certain disease depends on many different factors, including the biological effect of treatment, region or location within the body, patient status (e.g. age, weight, gender, hereditary risks, other disabilities, secondary conditions), toxicity, metabolism, bioaccumulation, therapeutic index, dosage, and other factors known in the art. Determining a standard of care for a disease is also dependent on establishing safety and efficacy in clinical trials as standardized by regulatory bodies such as the US Food and Drug Administration, International Council for Harmonisation, Health Canada, European Medicines Agency, Therapeutics Goods Administration, Central Drugs Standard Control Organization, National Medical Products Administration, Pharmaceuticals and Medical Devices Agency, Ministry of Food and Drug Safety, and the World Health Organization. The standard of care for a disease may include but is not limited to surgery, radiation, chemotherapy, targeted therapy, or immunotherapy.

[0109] As used herein, the term “inhibit” refers to the reduction or decrease in an expected activity, such as a cellular activity. The reduction or decrease may be by at least 5%, 10%, 20%, 30%, 40%, 50%, 60%, 70%, 80%, 90%, or 100%, or any percentage that is within a range defined by any two of the aforementioned values, where a reduction or decrease of 100% indicates a complete inhibition and any lower percentage indicates a partial inhibition. The reduction or decrease of the expected activity may be observed in a direct or indirect way.

[0110] As used herein, the term “stroke” refers to a medical disorder involving disruption of normal blood flow supplying the brain. There are generally two categories of stroke: ischemic stroke (including thrombotic stroke, embolic stroke, or transient ischemic attack) where blood supply is cut off from the brain, such as from blockage due to a blood clot, blood vessel compression, or atherosclerotic plaques; and hemorrhagic stroke (including intracerebral hemorrhage or subarachnoid hemorrhage) where disruption of blood vessels leads to bleeding in the brain, which may be caused by a ruptured aneurism or physical trauma. Symptoms of stroke involve neurological issues such as paralysis, loss of feeling, loss of vision, dizziness, difficulty speaking, or issues with cognitive ability. Patients with a stroke or at risk of developing a stroke may be selected by assessing causative factors, such as high blood pressure, smoking, obesity, high blood cholesterol, diabetes, kidney disease, or heart dysfunction. As disclosed herein, the compositions disclosed herein may be used for the treatment or prophylaxis for strokes or symptoms thereof, including those provided herein or otherwise known in the art.

[0111] As used herein, the term “traumatic brain injury (TBI)” refers to a medical condition involving damage to the brain caused by an external force, such as blunt trauma, falls, collisions, sudden changes in acceleration, or explosions. The external force exerted on the brain can result in damage to brain tissue and resulting loss of function of the affected region. Symptoms, which may differ in severity based on the severity of the TBI, may include dizziness, headache, vomiting, lethargy, increased intracranial pressure, edema, unconsciousness, and issues with cognitive ability. Patients with traumatic brain injury may be assessed by medical examination following the external insult. Individuals who are at risk of developing traumatic brain injury may be assessed based on their lifestyle, such as occupation, hobbies, age, or tendencies in behavior. As disclosed herein, the compositions disclosed herein may be used for the treatment or prophylaxis for TBI or symptoms thereof, including those provided herein or otherwise known in the art.

[0112] As used herein, the term “fibrin” refers to the protein that is involved in blood clotting, and is also known as “Factor Ia”. Upon blood vessel disruption, circulating fibrinogen is proteolytically processed by thrombin to form fibrin, which polymerizes and forms an insoluble network that, among other functions, captures platelets in order to block the blood vessel injury, preventing additional blood from escaping as well as preventing external substances, such as pathogens, from entering. The activity of fibrin and other components of the coagulation cascade may lead to harmful blood clots and thrombosis. As disclosed herein, the compositions disclosed herein may be used for the treatment or prophylaxis for disorders associated with fibrin activity or dysfunction, or symptoms thereof, including those provided herein or otherwise known in the art.

[0113] The term “% w/w” or “% wt/wt” means a percentage expressed in terms of the weight of the ingredient or agent over the total weight of the composition multiplied by 100.

[0114] It is understood that an antibody with an antibody name described herein can be referred using a shortened version of the antibody name, as long as there are no conflicts with another antibody described herein. For example, F846C.1B2 can also be referred to as 846C.1B2, or 846.1B2. This can also refer to fragments of the antibody (e.g., with the same 1, 3, or 6 CDRs).

### Exemplary Methods of Treatment and/or Use

[0115] Any of the anti-Gal3 antibodies or binding fragments thereof, or antigen binding molecules, and formulations thereof, provided herein may be used in methods as provided herein.

[0116] Disclosed herein in some embodiments are methods for inhibiting, reducing, preventing, and/or treating stroke in a subject in need thereof. The methods comprise administering an anti-Gal3 antibody or binding fragment thereof to the subject, thereby inhibiting, reducing, preventing, and/or treating the stroke. In some embodiments, any of the methods disclosed herein involving an anti-Gal3 antibody or binding fragment can be performed with an antigen binding molecule that binds to Gal3.

[0117] In some embodiments, a method for inhibiting, reducing, preventing, and/or treating traumatic brain injury (TBI) in a subject in need thereof is disclosed. In some embodiments, the method comprises administering an anti-Gal3 antibody or binding fragment thereof to the subject, thereby inhibiting, reducing, preventing, and/or treating the TBI.

[0118] In some embodiments, a method for inhibiting, reducing, preventing, and/or treating a disorder associated with fibrin activity or dysfunction in a subject in need thereof is disclosed. In some embodiments, the method comprises administering an anti-Gal3 antibody or binding fragment thereof to the subject, thereby inhibiting, reducing, preventing, and/or treating the disorder associated with fibrin activity or dysfunction.

[0119] In some embodiments, a method for administering an anti-Gal3 antibody is disclosed. In some embodiments, the method comprises administering 5 unit doses of an anti-Gal3 antibody or binding fragment thereof, wherein each unit dose comprise 1000 mg or about 1000 mg of the anti-Gal3 antibody or binding fragment thereof, wherein the unit doses are administered every 7 days or about 7 days, and wherein each unit dose is administered over the course of 1 hour or about 1 hour.

[0120] In some embodiments, a single-use sealed injectable glass vial is disclosed. In some embodiments, the single-use sealed injectable glass vial comprises 8 mL of 20 mg/mL of an anti-Gal antibody or binding fragment thereof.

[0121] In some embodiments, an IV infusion bag is disclosed. In some embodiments, the IV infusion bag comprises 1000 mg or about 1000 mg of an anti-Gal3 antibody or binding fragment thereof dissolved in 250 mL or about 250 mL of saline.

[0122] In some embodiments, the methods further comprise selecting the subject as having the stroke or at risk of contracting the stroke prior to the administering step. In some embodiments, selecting the subject as having the stroke or at risk of contracting the stroke comprises assessing the subject according to the National Institutes of Health Stroke Scale (NIHSS), modified Rankin Scale (mRS), Fugl-Meyer Assessment (FMA), Montreal Cognitive Assessment (MoCA), neuroimaging (such as CT or MRI), and/or detecting stroke biomarkers (including but not limited to S100 calcium binding protein B (S100B), glial fibrillary acidic protein (GFAP), neuron-specific enolase (NSE), and/or matrix metalloproteinase-9 (MMP9)). In some embodiments, the methods further comprise detecting an amelioration of symptoms associated with the stroke after the administering step. In some embodiments, the stroke is an ischemic stroke, thrombotic stroke, embolic stroke, transient ischemic attack, hemorrhagic stroke, intracerebral hemorrhage, or subarachnoid hemorrhage. In some embodiments, the stroke is intracerebral hemorrhage (ICH). In some embodiments, the ICH is associated with deposition of amyloid aggregates and/or cerebral amyloid angiopathy (CAA).

[0123] In some embodiments, the method for inhibiting, reducing, preventing, and/or treating stroke in a subject comprises detecting decreased loss of locomotor dysfunction, decreased incidence of microhemorrhage, decreased levels of activated microglia, decreased levels of activated astrocytes, decreased circulating proinflammatory immune cells, decreased circulating proinflammatory cytokines, or any combination thereof, in the subject.

[0124] In some embodiments, the reduction in locomotor dysfunction is assessed by the Fugl-Meyer Assessment (FMA), Motor Assessment Scale (MAS), and/or the Chedoke-McMaster Stroke Assessment (CMSA).

[0125] In some embodiments, the reduction in locomotor dysfunction in the subject is by at least 50%. In some embodiments, the reduction in locomotor dysfunction in the subject, is by at least 5%, 10%, 20%, 30%, 40%, 50%, 60%, 70%, 80%, 90%, or 95%, or any percentage within a range defined by any two of the aforementioned reductions. For example, in some embodiments, the reduction in locomotor dysfunction in the subject, is by at least 5%-95%, 5%-90%, 5%-75% 5%-50%,5%-25%, 5%-10%, 5%-7%, 7%-95%, 7%-90%, 7%-75%, 7%-50%, 7%-25%,7%-10%, 10%-95%, 10%-90%, 10%-75%, 10%-50%, 10%-25%, 25%-95%, 25%-90%, 25%-75%, 25%-50%, 50%-95%, 50%-90%, 50%-75%, 75%-95%, 75%-90%, and 90%-95%.

[0126] In some embodiments, the reduction in microhemorrhage is assessed by neuroimaging, MRI, and/or Prussian blue staining.

[0127] In some embodiments, the reduction in microhemorrhage in the subject, is by at least 50%. In some embodiments, the reduction in microhemorrhage in the subject, is by at least 5%, 10%, 20%, 30%, 40%, 50%, 60%, 70%, 80%, 90%, or 95%, or any percentage within a range defined by any two of the aforementioned reductions. For example, in some embodiments, reduction in microhemorrhage is by at least 5%-95%, 5%-90%, 5%-75% 5%-50%, 5%-25%, 5%-10%, 5%-7%, 7%-95%, 7%-90%, 7%-75%, 7%-50%, 7%-25%, 7%-10%, 10%-95%, 10%-90%, 10%-75%, 10%-50%, 10%-25%, 25%-95%, 25%-90%, 25%-75%, 25%-50%, 50%-95%, 50%-90%, 50%-75%, 75%-95%, 75%-90%, and 90%-95%.

[0128] In some embodiments, the reduction in levels of activated microglia is assessed by detection of microglia activation markers, optionally ionized calcium-binding adaptor molecule 1 (Iba1), monocyte chemoattractant protein-1 (MCP-1), chitinase-3-like protein 1 (YKL-40), and/or soluble CD14 (sCD14), optionally from the cerebrospinal fluid of the subject.

[0129] In some embodiments, the reduction in levels of activated microglia in the subject is by at least 20%. In some embodiments, the reduction in levels of activated microglia, reduction in levels of activated astrocytes, reduction in levels of circulating proinflammatory cytokines, or any combination thereof, in the subject, is by at least 5%, 10%, 20%, 30%, 40%, 50%, 60%, 70%, 80%, 90%, or 95%, or any percentage within a range defined by any two of the aforementioned reductions. For example, in some embodiments, the reduction in levels of activated microglia in the subject, is by at least 5%-95%, 5%-90%, 5%-75% 5%-50%, 5%-25%, 5%-10%, 5%-7%, 7%-95%, 7%-90%, 7%-75%, 7%-50%, 7%-25%, 7%-10%, 10%-95%, 10%-90%, 10%-75%, 10%-50%, 10%-25%, 25%-95%, 25%-90%, 25%-75%, 25%-50%, 50%-95%, 50%-90%, 50%-75%, 75%-95%, 75%-90%, and 90%-95%.

[0130] In some embodiments, the reduction in levels of activated astrocytes is assessed by detection of astrocyte activation markers, optionally GFAP and/or S100B, optionally from the cerebrospinal fluid of the subject.

[0131] In some embodiments, the reduction in levels of activated astrocytes in the subject is by at least 30%. In some embodiments, the reduction in levels of activated astrocytes in the subject, is by at least 5%, 10%, 20%, 30%, 40%, 50%, 60%, 70%, 80%, 90%, or 95%, or any percentage within a range defined by any two of the aforementioned reductions. For example, in some embodiments, the reduction in levels of activated astrocytes in the subject, is by at least 5%-95%, 5%-90%, 5%-75% 5%-50%, 5%-25%, 5%-10%, 5%-7%, 7%-95%, 7%-90%, 7%-75%,7%-50%, 7%-25%, 7%-10%, 10%-95%, 10%-90%, 10%-75%, 10%-50%, 10%-25%, 25%-95%, 25%-90%, 25%-75%, 25%-50%, 50%-95%, 50%-90%, 50%-75%, 75%-95%, 75%-90%, and 90%-95%.

[0132] In some embodiments, the reduction in levels of circulating proinflammatory cytokines in the subject, is by at least 5%, 10%, 20%, 30%, 40%, 50%, 60%, 70%, 80%, 90%, or 95%, or any percentage within a range defined by any two of the aforementioned reductions. For example, in some embodiments, the reduction in levels of circulating proinflammatory cytokines in the subject, is by at least 5%-95%, 5%-90%, 5%-75% 5%-50%, 5%-25%, 5%-10%, 5%-7%, 7%-95%, 7%-90%, 7%-75%, 7%-50%, 7%-25%, 7%-10%, 10%-95%, 10%-90%, 10%-75%, 10%-50%, 10%-25%, 25%-95%, 25%-90%, 25%-75%, 25%-50%, 50%-95%, 50%-90%, 50%-75%, 75%-95%, 75%-90%, and 90%-95%.

[0133] In some embodiments, the reduction in levels circulating proinflammatory immune cells in the subject, is by at least 5%, 10%, 20%, 30%, 40%, 50%, 60%, 70%, 80%, 90%, or 95%, or any percentage within a range defined by any two of the aforementioned reductions. For example, in some embodiments, the reduction in locomotor dysfunction, reduction in microhemorrhage, reduction in circulating proinflammatory immune cells in the subject is by at least 5%-95%, 5%-90%, 5%-75% 5%-50%, 5%-25%, 5%-10%, 5%-7%, 7%-95%7%-90%, 7%-75%, 7%-50%, 7%-25%, 7%-10%, 10%-95%, 10%-90%, 10%-75%, 10%-50%, 10%-25%, 25%-95%, 25%-90%, 25%-75%, 25%-50%, 50%-95%, 50%-90%, 50%-75%, 75%-95%, 75%-90%, and 90%-95%.

[0134] In some embodiments, a method for inhibiting, reducing, preventing, and/or treating traumatic brain injury (TBI) in a subject in need thereof is disclosed. In some embodiments, the TBI is associated with a concussion, edema, diffuse axonal injury, spinal cord injury, coma, neuroinflammation, microhemorrhage, astrocytosis, activated microglia, and/or hematoma.

[0135] In some embodiments, administration of the anti-Gal3 antibody or binding fragment thereof prevents elevation of levels of activated microglia, prevents elevation of levels of activated astrocytes, prevents elevation of levels of macrophages, prevents elevation of levels of hyperphosphorylated Tau, prevents incidence of microhemorrhage, prevents neuroinflammation, prevents elevation of levels of circulating proinflammatory cytokines, or any combination thereof, in the subject.

[0136] In some embodiments, wherein administration of the anti-Gal3 antibody or binding fragment thereof improves the level of consciousness, memory loss, and/or the Glasgow Coma Scale of the patient; and/or reduces levels of activated microglia, reduces levels of activated astrocytes, reduces levels of macrophages, reduces levels of hyperphosphorylated Tau, reduces microhemorrhage, reduces neuroinflammation, reduces levels of circulating proinflammatory cytokines or any combination thereof, in the subject.

[0137] In some embodiments, administration of the anit-Gal3 antibody results in a reduction in levels of activated microglia, reduction in levels of activated astrocytes, reduction in levels of macrophages, reduction in levels of hyperphosphorylated Tau, reduction in microhemorrhage, reduction in neuroinflammation, reduction in levels of circulating proinflammatory cytokines, or any combination thereof, in the subject.

[0138] In some embodiments, the reduction in levels of activated microglia in the subject is by at least 70%. In some embodiments, the reduction in levels of activated microglia in the subject is by at least 5%, 10%, 20%, 30%, 40%, 50%, 60%, 70%, 80%, 90%, or 95%, or any percentage within a range defined by any two of the aforementioned reductions. For example, in some embodiments, the reduction in levels of activated microglia in the subject, is by at least 5%-95%, 5%-90%, 5%-75% 5%-50%, 5%-25%, 5%-10%, 5%-7%, 7%-95%, 7%-90%, 7%-75%, 7%-50%, 7%-25%,7%-10%, 10%-95%, 10%-90%, 10%-75%, 10%-50%, 10%-25%, 25%-95%, 25%-90%, 25%-75%, 25%-50%, 50%-95%, 50%-90%, 50%-75%, 75%-95%, 75%-90%, and 90%-95%.

[0139] In some embodiments, the reduction in levels of activated astrocytes is assessed by detection of astrocyte activation markers, optionally GFAP, optionally from the cerebrospinal fluid of the subject.

[0140] In some embodiments, the reduction in levels of activated astrocytes in the subject is by at least 90%. In some embodiments, the reduction in levels of activated astrocytes in the subject is by at least 5%, 10%, 20%, 30%, 40%, 50%, 60%, 70%, 80%, 90%, or 95%, or any percentage within a range defined by any two of the aforementioned reductions. For example, in some embodiments, the reduction in levels of activated astrocytes in the subject, is by at least 5%-95%, 5%-90%, 5%-75% 5%-50%, 5%-25%, 5%-10%, 5%-7%, 7%-95%, 7%-90%, 7%-75%, 7%-50%, 7%-25%, 7%-10%, 10%-95%, 10%-90%, 10%-75%, 10%-50%, 10%-25%, 25%-95%, 25%-90%,25%-75%, 25%-50%, 50%-95%, 50%-90%, 50%-75%, 75%-95%, 75%-90%, and 90%-95%.

[0141] In some embodiments, the reduction in levels of macrophages is assessed by detection of macrophage activation markers, optionally CD68, optionally from the cerebrospinal fluid of the subject.

[0142] In some embodiments, the reduction in levels of macrophages in the subject is by at least 70%. In some embodiments, the reduction in levels of macrophages in the subject is by at least 5%, 10%, 20%, 30%, 40%, 50%, 60%, 70%, 80%, 90%, or 95%, or any percentage within a range defined by any two of the aforementioned reductions. For example, in some embodiments, the reduction in levels of macrophages in the subject, is by at least 5%-95%, 5%-90%, 5%-75% 5%-50%, 5%-25%, 5%-10%, 5%-7%, 7%-95%, 7%-90%, 7%-75%, 7%-50%, 7%-25%, 7%-10%, 10%-95%, 10%-90%, 10%-75%, 10%-50%, 10%-25%, 25%-95%, 25%-90%, 25%-75%, 25%-50%, 50%-95%, 50%-90%, 50%-75%, 75%-95%, 75%-90%, and 90%-95%.

[0143] In some embodiments, the reduction in levels of hyperphosphorylated Tau in the subject is by at least 80%. In some embodiments, the reduction in levels of hyperphosphorylated Tau in the subject is by at least 5%, 10%, 20%, 30%, 40%, 50%, 60%, 70%, 80%, 90%, or 95%, or any percentage within a range defined by any two of the aforementioned reductions. For example, in some embodiments, the reduction in levels of hyperphosphorylated Tau in the subject, is by at least 5%-95%, 5%-90%, 5%-75% 5%-50%, 5%-25%, 5%-10%, 5%-7%, 7%-95%, 7%-90%, 7%-75%, 7%-50%, 7%-25%, 7%-10%, 10%-95%, 10%-90%, 10%-75%, 10%-50%, 10%-25%, 25%-95%, 25%-90%, 25%-75%, 25%-50%, 50%-95%, 50%-90%, 50%-75%, 75%-95%, 75%-90%, and 90%-95%.

[0144] In some embodiments, the reduction in levels of microhemorrhage is assessed by neuroimaging, MRI, and/or Prussian blue staining.

[0145] In some embodiments, the reduction in microhemorrhage in the subject is by at least 80%. In some embodiments, the reduction in microhemorrhage in the subject is by at least 5%, 10%, 20%, 30%, 40%, 50%, 60%, 70%, 80%, 90%, or 95%, or any percentage within a range defined by any two of the aforementioned reductions. For example, in some embodiments, the reduction in microhemorrhage in the subject, is by at least 5%-95%, 5%-90%, 5%-75% 5%-50%, 5%-25%, 5%-10%, 5%-7%, 7%-95%, 7%-90%, 7%-75%, 7%-50%, 7%-25%, 7%-10%, 10%-95%, 10%-90%, 10%-75%, 10%-50%, 10%-25%, 25%-95%, 25%-90%, 25%-75%, 25%-50%, 50%-95%, 50%-90%, 50%-75%, 75%-95%, 75%-90%, and 90%-95%.

[0146] In some embodiments, the reduction in neuroinflammation in the subject is by at least 70%. In some embodiments, the reduction in neuroinflammation in the subject is by at least 5%, 10%, 20%, 30%, 40%, 50%, 60%, 70%, 80%, 90%, or 95%, or any percentage within a range defined by any two of the aforementioned reductions. For example, in some embodiments, the reduction in neuroinflammation in the subject, is by at least 5%-95%, 5%-90%, 5%-75% 5%-50%, 5%-25%, 5%-10%, 5%-7%, 7%-95%, 7%-90%, 7%-75%, 7%-50%, 7%-25%, 7%-10%, 10%-95%, 10%-90%, 10%-75%, 10%-50%, 10%-25%, 25%-95%, 25%-90%, 25%-75%, 25%-50%, 50%-95%, 50%-90%, 50%-75%, 75%-95%, 75%-90%, and 90%-95%.

[0147] In some embodiments, a method for inhibiting, reducing, preventing, and/or treating a disorder associated with fibrin activity or dysfunction in a subject in need thereof is disclosed. In some embodiments, amelioration of one or more symptoms associated with the disorder associated with fibrin activity or dysfunction is detected after the administering step. In some embodiments, the one or more symptoms comprise neuroinflammation and/or fibrin oligomerization. In some embodiments, administration of the anti-Gal3 antibody or binding fragment thereof to the subject reduces neuroinflammation and/or fibrin oligomerization in the subject.

[0148] In some embodiments, the reduction in fibrin oligomerization in the subject is by at least 5%, 10%, 20%, 30%, 40%, 50%, 60%, 70%, 80%, 90%, or 95%, or any percentage within a range defined by any two of the aforementioned reductions. For example, in some embodiments, the reduction in fibrin oligomerization in the subject, is by at least 5%-95%, 5%-90%, 5%-75% 5%-50%, 5%-25%,5%-10%, 5%-7%, 7%-95%, 7%-90%, 7%-75%, 7%-50%, 7%-25%, 7%-10%, 10%-95%, 10%-90%, 10%-75%, 10%-50%, 10%-25%, 25%-95%, 25%-90%, 25%-75%, 25%-50%, 50%-95%, 50%-90%, 50%-75%, 75%-95%, 75%-90%, and 90%-95%.

[0149] Exemplary standardized approaches for assessing severity of neurological issues such as stroke and TBI are described herein. It should be understood that these and other approaches have been recognized in the art for their utility in quantifying neurological capabilities in patients. Other approaches used in the common knowledge are also envisioned as alternatives to those provided herein.

[0150] National Institutes of Health Stroke Scale (NIHSS): The NIHSS provides an objective quantification of the impairment caused by a stroke. The NIHSS was designed to be a standardized and repeatable assessment of stroke patients utilized by large multi-center clinical trials. It has good interrater and test-retest reliability. The NIHSS has also been used to predict 3-month outcomes (e.g. hospital stay, mortality) of patients following a stroke.

[0151] The NIHSS is composed of 11 items, each of which rates a specific parameter of ability or function. Each item is rated from 0 to 4. A score of 0 indicates normal function, with higher scores indicating greater degree of impairment. The individual item scores are added to calculate the NIHSS total score. The maximum possible score is 42 (death), with the minimum score being a 0 (no impairment). The items scored are level of consciousness, horizontal eye movement, visual field, facial palsy, motor arm, motor leg, limb ataxia, sensory, language, speech, and extinction and inattention.

[0152] In some embodiments, evaluation by the NIHSS can be assessed 7, 35, and/or 75 days after the step of administering the anti-Gal3 antibody or binding fragment thereof.

[0153] Modified Rankin Scale: The mRS is another scale commonly used in stroke clinical trials for measuring the degree of disability or dependence in the daily activities of patients who have suffered a stroke. It consists of well-defined and easily understood grades that describe the range of global disability. The mRS exhibits a strong relationship with clinical measurements of stroke severity in addition to other disability and outcomes endpoints.

[0154] Scoring of the mRS involves a semi-structured interview between the patient and a trained facilitator. The scores range from “0” (no symptoms) to “6” (dead). It also has good interrater and test-retest reliability.

[0155] Fugl-Meyer Assessment: The FMA scale is an assessment of the sensorimotor impairment in patients who have had a stroke. It is widely used in clinical trials of stroke for the clinical assessment of motor function. The FMA score is found to have excellent consistency, responsivity and good accuracy.

[0156] Each item on the FMA is scored on a 3-point scale: 0 = cannot perform, 1 = task performed partially, 2 = task performed fully. The maximum possible score on the FMA scale is 226, which corresponds to full recovery. The 5 domains on the FMA are: motor function, sensory function, balance, range of motion, and joint pain.

[0157] Montreal Cognitive Assessment: The MoCA is a brief screening instrument designed to assess mild cognitive impairment in a variety of patient conditions. Scores on the MoCA range from 0 to 30, with lower scores indicating greater impairment. It takes approximately 10 minutes to administer the MoCA. The MoCA assesses eight cognitive domains: visuospatial ability, executive function, short-term memory recall, attention, concentration, working memory, language, and orientation to time and space. The MoCA is a particularly useful assessment for patients with impairment due to vascular conditions primarily because of the assessment of executive functions and the presence of more demanding visual construction tasks. The MoCA is one of the more commonly used cognitive assessments used in the research stroke setting.

[0158] A validation study indicated the sensitivity and specificity of the MoCA in detecting mild cognitive impairment were 90% and 97%, respectively, which was superior to that of the Mini Mental Status Examination.

[0159] The exemplary assessments described herein, as well as other standardized assessments known in the art, can be used to determine an improvement and/or amelioration of stroke or symptoms associated with the stroke in a subject. In some embodiments, detecting an amelioration of symptoms associated with the stroke after the administering step comprises detecting an improvement by the subject according to the NIHSS, mRS, FMA, or MoCA, which may be at endpoints determined by a practitioner. In some embodiments, a) the improvement by the subject according to the NIHSS comprises at least a 4 point decrease on the NIHSS; b) the improvement by the subject according to the mRS comprises at least a 1 point decrease on the mRS; c) the improvement by the subject according to the FMA comprises at least a 1 point increase on the FMA; and/or d) the improvement by the subject according to the MoCA comprises at least a 1 point increase on the MoCA, after the administering step. In some embodiments, the improvement by the subject is assessed 7, 35, and/or 75 days after the administering step.

[0160] In some embodiments, any of the endpoints depicted in Table 1 can be achieved or is the goal of any one of the appropriate methods provided herein. In some embodiments, the methods are performed to achieve any 1, 2, 3, or 4 of the objectives and/or are determined by any 1, 2, 3, or 4 of the endpoints depicted in Table 1.

[0161] In some embodiments, any one of the appropriate methods provided herein are performed to comprise assessing the subject by the NIHSS at Baseline (day 1 at the initial administration) and further assessed at Days 15, 36, 64, and 104 following the initial intervention. In some embodiments, any one of the appropriate methods provided herein comprise assessing the subject by the NIHSS at Baseline (day 1 at the initial administration) and further assessed at about Days 10-20, 31-41, 59-69, and 99-109 following the initial intervention. In some embodiments, the subject’s NIHSS is assessed at about month 1, 2, 3, 4, 5, 6, 7, 8, 9, 10, 11, or 12, following the initial administration, or at a timepoint that in a range that is defined by any two of the preceding values. For example, in some embodiments, the subject’s NIHSS is assessed at between about month 1 and 12, 1 and 8, 1 and 6, 1 and 4, 1 and 3, 3 and 12, 3 and 8, 3 and 6, 3 and 4, 4 and 12, 4 and 8, 4 and 6, 6 and 12, 6 and 8, or 8 and 12, following the initial intervention. In some embodiments, any one of the appropriate methods provided herein are performed to comprise assessing the subject by the NIHSS at Baseline (day 1 at the initial administration) and further assessed at one or more time points following the initial intervention. For example, the Subject’s NIHSS may be assessed at Baseline (day 1 at the initial administration) and further assessed at 1, 2, 3, 4, 5, 6, 7, 8, 9, 10, or more timepoints following the initial intervention, or assessed at a number of timepoints that is defined by any two of the preceding values. For example, in some embodiments, the Subject’s NIHSS is assessed at between about 1 and 10, 1 and 7, 1 and 5, 1 and 4, 1 and 3, 3 and 10, 3 and 7, 3 and 5, 5 and 10, or 5 and 7 timepoints following the initial intervention. In some embodiments, the Subject’s NIHSS is assessed more than 1 year following the initial intervention.

[0162] In some embodiments, the Subject’s NIHSS is decreased from Baseline (day 1 at the initial administration by day 36 following the initial intervention. In some embodiments, the Subject’s NIHSS is decreased from Baseline (day 1 at the initial administration by about day 31, 32, 33, 34, 35, 36, 37, 38, 39, 40, or 41, following the initial intervention, or at a time point that is in a range that is defined by any two of the preceding values. For example, in some embodiments, the Subject’s NIHSS is decreased from Baseline (day 1 at the initial administration by about days 31-41, 31 to 38, 31 to 36, 31 to 33, 33 to 41, 33 to 38, 33 to 36, 34 to 41, 34 to 37, or 37 to 41. In some embodiments, the subject’s decreased NIHSS is sustained from day 36 through day 64 following the initial intervention. In some embodiments, the subject’s decreased NIHSS is sustained from day 36 through day 104 following the initial intervention. In some embodiments, the subject’s decreased NIHSS is sustained from about day 31, 32, 33, 34, 35, 36, 37, 38, 39, 40, or 41 through about day 99, 100, 101, 102, 103, 104, 105, 105, 107, 108, or 109 following the initial intervention. In some embodiments, the subject’s decreased NIHSS is sustained from about month 1 to about month 2, 3, 4, 5, 6, 7, 8, 9, 10, 11, or 12, following the initial intervention, or for a period that is defined by any two of the preceding values. In some embodiments, the Subject’s NIHSS decreases within one month of the initial intervention. In some embodiments, the Subject’s decreased NIHSS is sustained for greater than about 3, 4, 5, 6, 7, 8, 9 10, 11, or 12 months following the initial intervention. In some embodiments, the Subject’s decreased NIHSS is sustained for greater than 12 months. For example, in some embodiments, the Subject’s decreased NIHSS is sustained for greater than about 1, 2, 3, 4, 5, 6, 7, 8, 9, 10, 11, 12, 13, 14, 15, 16, 17, 18, 19, or 20, years, or by a range that is defined by any two of the preceding values. For example, in some embodiments, the Subject’s decreased NIHSS is sustained for greater than about 1-20, 1-15, 1-10, 1-7, 1-5, 1-3, 3-20, 3-15, 3-10, 3-7, 3-5, 5-20, 5-15, 5-10, 5-7, 7-20, 7-15, 7-10, 10-20, 10-15, or 15-20 years.

[0163] In some embodiments, administration of the anti-Gal3 antibody or binding fragment thereof to the subject decreases the subject’s NIHSS by 1, 2, 3, and/or 4 points. In some embodiments, administration of the anti-Gal3 antibody or binding fragment thereof to the subject decreases the subject’s NIHSS by about 1, 2, 3, 4, 5, 6, 7, 8, 9, 10, 11, or 12, points, or by a range that is defined by any two of the preceding values. For example, in some embodiments, administration of the anti-Gal3 antibody or binding fragment thereof to the subject decreases the subject’s NIHSS by between about 1 and 12, 1 and 10, 1 and 8, 1 and 6, 1 and 4, 2 and 12, 2 and 10, 2 and 8, 2 and 6, 2 and 4, 4 and 12, 4 and 10, 4 and 8, 8 and 12, or 8 and 10 points. In some embodiments, administration of the anti-Gal3 antibody or binding fragment thereof to the subject decreases the subject’s NIHSS by about 1, 2, 3, 4, 5, 6, 7, 8, 9, 10, 15, 20, 25, 30, 40, 50, 60, 70, 75, 80, 90, 100, 200, 250, 300, 400, 500, 600, 700, 750, 800, 900, or 1000%, or by a range that is defined by any two of the preceding values. For example, in some embodiments, administration of the anti-Gal3 antibody or binding fragment thereof to the subject decreases the subject’s NIHSS by between about 1 and 1000, 1 and 750, 1 and 500, 1 and 250, 1 and 100, 1 and 75, 1 and 50, 1 and 25, 1 and 10, 1 and 5, 5 and 1000, 5 and 750, 5 and 500, 5 and 250, 5 and 100, 5 and 75, 5 and 50, 5 and 10, 10 and 1000, 10 and 750, 10 and 500, 10 and 250, 10 and 100, 10 and 75, 10 and 50, 10 and 25, 25 and 1000, 25 and 750, 25 and 500, 25 and 250, 25 and 100, 25 and 75, 25 and 50, 50 and 1000, 50 and 750, 50 and 500, 50 and 250, 50 and 100, 100 and 1000, 100 and 750, 100 and 500, 100 and 250, 250 and 1000, 250 and 750, 250 and 500, 500 and 1000, 500 and 750, or 750 and 1000%.

[0164] In some embodiments, administration of the anti-Gal3 antibody or binding fragment thereof to the subject decreases the subject’s level of consciousness score on the NIHSS by about 1, 2, 3, 4, 5, 6, or 7, points, or by a range that is defined by any two of the preceding values. For example, in some embodiments, administration of the anti-Gal3 antibody or binding fragment thereof to the subject decreases the subject’s level of consciousness score on the NIHSS by between about 1 and 7, 1 and 5, 1 and 3, 3 and 7, or 5 and 7 points.

[0165] In some embodiments, administration of the anti-Gal3 antibody or binding fragment thereof to the subject decreases the subject’s horizontal extraocular movements score on the NIHSS by about 1 or 2 points.

[0166] In some embodiments, administration of the anti-Gal3 antibody or binding fragment thereof to the subject decreases the subject’s visual fields score on the NIHSS by about 1, 2, or 3 points.

[0167] In some embodiments, administration of the anti-Gal3 antibody or binding fragment thereof to the subject decreases the subject’s facial palsy score on the NIHSS by about 1, 2, or 3 points.

[0168] In some embodiments, administration of the anti-Gal3 antibody or binding fragment thereof to the subject decreases the subject’s left arm motor drift score on the NIHSS by about 1, 2, 3, or 4 points.

[0169] In some embodiments, administration of the anti-Gal3 antibody or binding fragment thereof to the subject decreases the subject’s right arm motor drift score on the NIHSS by about 1, 2, 3, or 4 points.

[0170] In some embodiments, administration of the anti-Gal3 antibody or binding fragment thereof to the subject decreases the subject’s left leg motor drift score on the NIHSS by about 1, 2, 3, or 4 points.

[0171] In some embodiments, administration of the anti-Gal3 antibody or binding fragment thereof to the subject decreases the subject’s right leg motor drift score on the NIHSS by about 1, 2, 3, or 4 points.

[0172] In some embodiments, administration of the anti-Gal3 antibody or binding fragment thereof to the subject decreases the subject’s limb ataxia score on the NIHSS by about 1 or 2 points.

[0173] In some embodiments, administration of the anti-Gal3 antibody or binding fragment thereof to the subject decreases the subject’s language/aphasia score on the NIHSS by about 1, 2, or 3 points.

[0174] In some embodiments, administration of the anti-Gal3 antibody or binding fragment thereof to the subject decreases the subject’s dysarthria score on the NIHSS by about 1 or 2 points.

[0175] In some embodiments, administration of the anti-Gal3 antibody or binding fragment thereof to the subject decreases the subject’s extinction/inattention score on the NIHSS by about 1 or 2 points.

[0176] In some embodiments, any one of the appropriate methods provided herein are performed to comprise assessing the subject by the modified Rankin Scale (mRS) at Baseline (day 1 at the initial administration) and further assessed at Days 15, 36, 64, and 104 following the initial intervention. In some embodiments, any one of the appropriate methods provided herein are performed to comprise assessing the subject by the mRS at Baseline (day 1 at the initial administration) and further assessed at about Days 10-20, 31-41, 59-69, and 99-109 following the initial intervention. In some embodiments, the subject’s mRS is assessed at about month 1, 2, 3, 4, 5, 6, 7, 8, 9, 10, 11, or 12, following the initial administration, or at a timepoint that in a range that is defined by any two of the preceding values. For example, in some embodiments, the subject’s mRS is assessed at between about month 1 and 12, 1 and 8, 1 and 6, 1 and 4, 1 and 3, 3 and 12, 3 and 8, 3 and 6, 3 and 4, 4 and 12, 4 and 8, 4 and 6, 6 and 12, 6 and 8, or 8 and 12, following the initial intervention. In some embodiments, any one of the appropriate methods provided herein are performed to comprise assessing the subject by the mRS at Baseline (day 1 at the initial administration) and further assessed at one or more time points following the initial intervention. For example, the Subject’s mRS may be assessed at Baseline (day 1 at the initial administration) and further assessed at 1, 2, 3, 4, 5, 6, 7, 8, 9, 10, or more timepoints following the initial intervention, or assessed at a number of timepoints that is defined by any two of the preceding values. For example, in some embodiments, the Subject’s mRS is assessed at between about 1 and 10, 1 and 7, 1 and 5, 1 and 4, 1 and 3, 3 and 10, 3 and 7, 3 and 5, 5 and 10, or 5 and 7 timepoints following the initial intervention. In some embodiments, the Subject’s mRS is assessed more than 1 year following the initial intervention.

[0177] In some embodiments, the Subject’s mRS is decreased from Baseline (day 1 at the initial administration by day 36 following the initial intervention. In some embodiments, the Subject’s mRS is decreased from Baseline (day 1 at the initial administration by about day 31, 32, 33, 34, 35, 36, 37, 38, 39, 40, or 41, following the initial intervention, or at a time point that is in a range that is defined by any two of the preceding values. For example, in some embodiments, the Subject’s mRS is decreased from Baseline (day 1 at the initial administration by about days 31-41, 31 to 38, 31 to 36, 31 to 33, 33 to 41, 33 to 38, 33 to 36, 34 to 41, 34 to 37, or 37 to 41. In some embodiments, the subject’s decreased mRS is sustained from day 36 through day 64 following the initial intervention. In some embodiments, the subject’s decreased mRS is sustained from day 36 through day 104 following the initial intervention. In some embodiments, the subject’s decreased mRS is sustained from about day 31, 32, 33, 34, 35, 36, 37, 38, 39, 40, or 41 through about day 99, 100, 101, 102, 103, 104, 105, 105, 107, 108, or 109 following the initial intervention. In some embodiments, the subject’s decreased mRS is sustained from about month 1 to about month 2, 3, 4, 5, 6, 7, 8, 9, 10, 11, or 12, following the initial intervention, or for a period that is defined by any two of the preceding values. In some embodiments, the Subject’s mRS decreases within one month of the initial intervention. In some embodiments, the Subject’s decreased mRS is sustained for greater than about 3, 4, 5, 6, 7, 8, 9 10, 11, or 12 months following the initial intervention.

[0178] In some embodiments, administration of the anti-Gal3 antibody or binding fragment thereof to the subject decreases the subject’s mRS by 1 point. In some embodiments, administration of the anti-Gal3 antibody or binding fragment thereof to the subject decreases the subject’s mRS by about 1, 2, 3, 4, 5, or 6 points, or by a range that is defined by any two of the preceding values. In some embodiments, administration of the anti-Gal3 antibody or binding fragment thereof to the subject decreases the subject’s mRS by about 1, 2, 3, 4, 5, 6, 7, 8, 9, 10, 15, 20, 25, 30, 40, 50, 60, 70, 75, 80, 90, 100, 200, 250, 300, 400, 500, 600, 700, 750, 800, 900, or 1000%, or by a range that is defined by any two of the preceding values. For example, in some embodiments, administration of the anti-Gal3 antibody or binding fragment thereof to the subject decreases the subject’s mRS by between about 1 and 1000, 1 and 750, 1 and 500, 1 and 250, 1 and 100, 1 and 75, 1 and 50, 1 and 25, 1 and 10, 1 and 5, 5 and 1000, 5 and 750, 5 and 500, 5 and 250, 5 and 100, 5 and 75, 5 and 50, 5 and 10, 10 and 1000, 10 and 750, 10 and 500, 10 and 250, 10 and 100, 10 and 75, 10 and 50, 10 and 25, 25 and 1000, 25 and 750, 25 and 500, 25 and 250, 25 and 100, 25 and 75, 25 and 50, 50 and 1000, 50 and 750, 50 and 500, 50 and 250, 50 and 100, 100 and 1000, 100 and 750, 100 and 500, 100 and 250, 250 and 1000, 250 and 750, 250 and 500, 500 and 1000, 500 and 750, or 750 and 1000%.

[0179] In some embodiments, any one of the appropriate methods provided herein are performed to comprise assessing the subject by the Fugl-Meyer Assessment (FMA) at Baseline (day 1 at the initial administration) and further assessed at Days 15, 36, 64, and 104 following the initial intervention. In some embodiments, any one of the appropriate methods provided herein are performed to comprise assessing the subject by the FMA at Baseline (day 1 at the initial administration) and further assessed at about Days 10-20, 31-41, 59-69, and 99-109 following the initial intervention. In some embodiments, the subject’s mRS is assessed at about month 1, 2, 3, 4, 5, 6, 7, 8, 9, 10, 11, or 12, following the initial administration, or at a timepoint that in a range that is defined by any two of the preceding values. For example, in some embodiments, the subject’s FMA is assessed at between about month 1 and 12, 1 and 8, 1 and 6, 1 and 4, 1 and 3, 3 and 12, 3 and 8, 3 and 6, 3 and 4, 4 and 12, 4 and 8, 4 and 6, 6 and 12, 6 and 8, or 8 and 12, following the initial intervention. In some embodiments, any one of the appropriate methods provided herein are performed to comprise assessing the subject by the mRS at Baseline (day 1 at the initial administration) and further assessed at one or more time points following the initial intervention. For example, the Subject’s FMA may be assessed at Baseline (day 1 at the initial administration) and further assessed at 1, 2, 3, 4, 5, 6, 7, 8, 9, 10, or more timepoints following the initial intervention, or assessed at a number of timepoints that is defined by any two of the preceding values. For example, in some embodiments, the Subject’s FMA is assessed at between about 1 and 10, 1 and 7, 1 and 5, 1 and 4, 1 and 3, 3 and 10, 3 and 7, 3 and 5, 5 and 10, or 5 and 7 timepoints following the initial intervention. In some embodiments, the Subject’s FMA is assessed more than 1 year following the initial intervention.

[0180] In some embodiments, the Subject’s FMA is increased from Baseline (day 1 at the initial administration by day 36 following the initial intervention. In some embodiments, the Subject’s FMA is increased from Baseline (day 1 at the initial administration by about day 31, 32, 33, 34, 35, 36, 37, 38, 39, 40, or 41, following the initial intervention, or at a time point that is in a range that is defined by any two of the preceding values. For example, in some embodiments, the Subject’s FMA is increased from Baseline (day 1 at the initial administration by about days 31-41, 31 to 38, 31 to 36, 31 to 33, 33 to 41, 33 to 38, 33 to 36, 34 to 41, 34 to 37, or 37 to 41. In some embodiments, the subject’s increased FMA is sustained from day 36 through day 64 following the initial intervention. In some embodiments, the subject’s decreased FMA is sustained from day 36 through day 104 following the initial intervention. In some embodiments, the subject’s increased FMA is sustained from about day 31, 32, 33, 34, 35, 36, 37, 38, 39, 40, or 41 through about day 99, 100, 101, 102, 103, 104, 105, 105, 107, 108, or 109 following the initial intervention. In some embodiments, the subject’s increased FMA is sustained from about month 1 to about month 2, 3, 4, 5, 6, 7, 8, 9, 10, 11, or 12, following the initial intervention, or for a period that is defined by any two of the preceding values. In some embodiments, the Subject’s FMA increases within one month of the initial intervention. In some embodiments, the Subject’s increased FMA is sustained for greater than about 3, 4, 5, 6, 7, 8, 9 10, 11, or 12 months following the initial intervention.

[0181] In some embodiments, administration of the anti-Gal3 antibody or binding fragment thereof to the subject increases the subject’s FMA by about 1, 2, 3, 4, 5, 6, 7, 8, 9, 10, 11, 12, 13, 14, 15, 20, 25, 30, 40, 50, 60, 70, 80, 90, 100, 110, 120, 130, 140, 150, 160, 170, 180, 190, 200, 210, 220, 225, or 226 points, or by a range that is defined any two of the preceding values. For example, in some embodiments, administration of the anti-Gal3 antibody or binding fragment thereof to the subject increases the subject’s FMA by between about 1 and 226, 1 and 200, 1 and 150, 1 and 100, 1 and 75, 1 and 50, 1 and 25, 1 and 10, 1 and 5, 5 and 226, 5 and 200, 5 and 150, 5 and 100, 5 and 75, 5 and 50, 5 and 25, 5 and 10, 10 and 226, 10 and 200, 10 and 150, 10 and 100, 10 and 75, 10 and 50, 10 and 25, 25 and 226, 25 and 200, 25 and 150, 25 and 100, 25 and 75, 25 and 50, 50 and 226, 50 and 200, 50 and 150, 50 and 100, 50 and 75, 75 and 226, 75 and 200, 75 and 150, 75 and 100, 100 and 226, 100 and 200, 100 and 150, 150 and 226, 150 and 200, or 200 and 226, points. In some embodiments, administration of the anti-Gal3 antibody or binding fragment thereof to the subject decreases the subject’s FMA by about 1, 2, 3, 4, 5, 6, 7, 8, 9, 10, 15, 20, 25, 30, 40, 50, 60, 70, 75, 80, 90, 100, 200, 250, 300, 400, 500, 600, 700, 750, 800, 900, or 1000%, or by a range that is defined by any two of the preceding values. For example, in some embodiments, administration of the anti-Gal3 antibody or binding fragment thereof to the subject increases the subject’s FMA by between about 1 and 1000, 1 and 750, 1 and 500, 1 and 250, 1 and 100, 1 and 75, 1 and 50, 1 and 25, 1 and 10, 1 and 5, 5 and 1000, 5 and 750, 5 and 500, 5 and 250, 5 and 100, 5 and 75, 5 and 50, 5 and 10, 10 and 1000, 10 and 750, 10 and 500, 10 and 250, 10 and 100, 10 and 75, 10 and 50, 10 and 25, 25 and 1000, 25 and 750, 25 and 500, 25 and 250, 25 and 100, 25 and 75, 25 and 50, 50 and 1000, 50 and 750, 50 and 500, 50 and 250, 50 and 100, 100 and 1000, 100 and 750, 100 and 500, 100 and 250, 250 and 1000, 250 and 750, 250 and 500, 500 and 1000, 500 and 750, or 750 and 1000%.

[0182] In some embodiments, administration of the anti-Gal3 antibody or binding fragment thereof to the subject increases the subject’s motor score on the FMA by about 1, 2, 3, 4, 5, 6, 7, 8, 9, 10, 11, 12, 13, 14, 15, 20, 25, 30, 40, 50, 60, 70, 80, 90, or 100, points, or by a range that is defined any two of the preceding values. For example, in some embodiments, administration of the anti-Gal3 antibody or binding fragment thereof to the subject increases the subject’s motor score on the FMA by between about 1 and 100, 1 and 75, 1 and 50, 1 and 25, 1 and 10, 1 and 5, 5 and 100, 5 and 75, 5 and 50, 5 and 25, 5 and 10, 10 and 100, 10 and 75, 10 and 50, 10 and 25, 25 and 100, 25 and 75, 25 and 50, 50 and 100, 50 and 75, or 75 and 100, points.

[0183] In some embodiments, administration of the anti-Gal3 antibody or binding fragment thereof to the subject increases the subject’s upper extremity motor score on the FMA by about 1, 2, 3, 4, 5, 6, 7, 8, 9, 10, 11, 12, 13, 14, 15, 20, 25, 30, 40, 50, 60, 65, or 66, points, or by a range that is defined any two of the preceding values. For example, in some embodiments, administration of the anti-Gal3 antibody or binding fragment thereof to the subject increases the subject’s upper extremity motor score on the FMA by between about 1 and 66, 1 and 50, 1 and 25, 1 and 10, 1 and 5, 5 and 66, 5 and 50, 5 and 25, 5 and 10, 10 and 66, 10 and 50, 10 and 25, 25 and 66, 25 and 50, or 50 and 66, points.

[0184] In some embodiments, administration of the anti-Gal3 antibody or binding fragment thereof to the subject increases the subject’s lower extremity motor score on the FMA by about 1, 2, 3, 4, 5, 6, 7, 8, 9, 10, 11, 12, 13, 14, 15, 20, 25, 30, or 34, points, or by a range that is defined any two of the preceding values. For example, in some embodiments, administration of the anti-Gal3 antibody or binding fragment thereof to the subject increases the subject’s lower extremity motor score on the FMA by between about 1 and 34, 1 and 25, 1 and 10, 1 and 5, 5 and 34, 5 and 25, 5 and 10, 10 and 34, 10 and 25, or 25 and 34, points.

[0185] In some embodiments, administration of the anti-Gal3 antibody or binding fragment thereof to the subject increases s the subject’s sensation score on the FMA by about 1, 2, 3, 4, 5, 6, 7, 8, 9, 10, 11, 12, 13, 14, 15, 20, or 24, points, or by a range that is defined any two of the preceding values. For example, in some embodiments, administration of the anti-Gal3 antibody or binding fragment thereof to the subject increases the subject’s sensation score on the FMA by between about 1 and 24, 1 and 10, 1 and 5, 5 and 24, 5 and 10, or 10 and 24, points.

[0186] In some embodiments, administration of the anti-Gal3 antibody or binding fragment thereof to the subject increases the subject’s light touch sensation score on the FMA by about 1, 2, 3, 4, 5, 6, 7, or 8, points, or by a range that is defined any two of the preceding values. For example, in some embodiments, administration of the anti-Gal3 antibody or binding fragment thereof to the subject increases the subject’s light touch sensation score on the FMA by between about 1 and 8, 1 and 6, 1 and 4, 4 and 8, or 6 and 8, points.

[0187] In some embodiments, administration of the anti-Gal3 antibody or binding fragment thereof to the subject increases the subject’s position sensation score on the FMA by about 1, 2, 3, 4, 5, 6, 7, 8, 9, 10, 11, 12, 13, 14, 15, or 16, points, or by a range that is defined any two of the preceding values. For example, in some embodiments, administration of the anti-Gal3 antibody or binding fragment thereof to the subject d increases the subject’s position sensation score on the FMA by between about 1 and 16, 1 and 10, 1 and 5, 5 and 16, 5 and 10, or 10 and 16, points.

[0188] In some embodiments, administration of the anti-Gal3 antibody or binding fragment thereof to the subject increases the subject’s balance score on the FMA by about 1, 2, 3, 4, 5, 6, 7, 8, 9, 10, 11, 12, 13, or 14, points, or by a range that is defined any two of the preceding values. For example, in some embodiments, administration of the anti-Gal3 antibody or binding fragment thereof to the subject increases the subject’s balance score on the FMA by between about 1 and 14, 1 and 10, 1 and 5, 5 and 14, 5 and 10, or 10 and 14, points.

[0189] In some embodiments, administration of the anti-Gal3 antibody or binding fragment thereof to the subject increases the subject’s sitting balance score on the FMA by about 1, 2, 3, 4, 5, or 6, points, or by a range that is defined any two of the preceding values. For example, in some embodiments, administration of the anti-Gal3 antibody or binding fragment thereof to the subject increases the subject’s balance score on the FMA by between about 1 and 6, 1 and 3, or 3 and 6, points.

[0190] In some embodiments, administration of the anti-Gal3 antibody or binding fragment thereof to the subject increases the subject’s standing balance score on the FMA by about 1, 2, 3, 4, 5, 6, 7, or 8, points, or by a range that is defined any two of the preceding values. For example, in some embodiments, administration of the anti-Gal3 antibody or binding fragment thereof to the subject increases the subject’s balance score on the FMA by between about 1 and 8, 1 and 6, 1 and 4, 4 and 8, 4 and 6, or 6 and 8, points.

[0191] In some embodiments, administration of the anti-Gal3 antibody or binding fragment thereof to the subject increases the subject’s joint range of motion score on the FMA by about 1, 2, 3, 4, 5, 6, 7, 8, 9, 10, 11, 12, 13, 14, 15, 20, 25, 30, 40, or 44, points, or by a range that is defined any two of the preceding values. For example, in some embodiments, administration of the anti-Gal3 antibody or binding fragment thereof to the subject increases the subject’s joint range of motion score on the FMA by between about 1 and 44, 1 and 30, 1 and 25, 1 and 10, 1 and 5, 5 and 44, 5 and 30, 5 and 25, 5 and 10, 10 and 44, 10 and 30, 10 and 25, 25 and 44, 25 and 30, or 30 and 44, points.

[0192] In some embodiments, administration of the anti-Gal3 antibody or binding fragment thereof to the subject increases the subject’s joint pain score on the FMA by about 1, 2, 3, 4, 5, 6, 7, 8, 9, 10, 11, 12, 13, 14, 15, 20, 25, 30, 40, or 44, points, or by a range that is defined any two of the preceding values. For example, in some embodiments, administration of the anti-Gal3 antibody or binding fragment thereof to the subject increases the subj ect’s joint pain score on the FMA by between about 1 and 44, 1 and 30, 1 and 25, 1 and 10, 1 and 5, 5 and 44, 5 and 30, 5 and 25, 5 and 10, 10 and 44, 10 and 30, 10 and 25, 25 and 44, 25 and 30, or 30 and 44, points.

[0193] In some embodiments, any one of the appropriate methods provided herein are performed to comprise assessing the subject by the Montreal Cognitive Assessment (MoCA) at Baseline (day 1 at the initial administration) and further assessed at Days 15, 36, 64, and 104 following the initial intervention. In some embodiments, any one of the appropriate methods provided herein are performed to comprise assessing the subject by the MoCA at Baseline (day 1 at the initial administration) and further assessed at about Days 10-20, 31-41, 59-69, and 99-109 following the initial intervention. In some embodiments, the subject’s MoCA is assessed at about month 1, 2, 3, 4, 5, 6, 7, 8, 9, 10, 11, or 12, following the initial administration, or at a timepoint that in a range that is defined by any two of the preceding values. For example, in some embodiments, the subject’s MoCA is assessed at between about month 1 and 12, 1 and 8, 1 and 6, 1 and 4, 1 and 3, 3 and 12, 3 and 8, 3 and 6, 3 and 4, 4 and 12, 4 and 8, 4 and 6, 6 and 12, 6 and 8, or 8 and 12, following the initial intervention. In some embodiments, any one of the appropriate methods provided herein are performed to comprise assessing the subject by the MoCA at Baseline (day 1 at the initial administration) and further assessed at one or more time points following the initial intervention. For example, the Subject’s MoCA may be assessed at Baseline (day 1 at the initial administration) and further assessed at 1, 2, 3, 4, 5, 6, 7, 8, 9, 10, or more timepoints following the initial intervention, or assessed at a number of timepoints that is defined by any two of the preceding values. For example, in some embodiments, the Subject’s MoCA is assessed at between about 1 and 10, 1 and 7, 1 and 5, 1 and 4, 1 and 3, 3 and 10, 3 and 7, 3 and 5, 5 and 10, or 5 and 7 timepoints following the initial intervention. In some embodiments, the Subject’s MoCA is assessed more than 1 year following the initial intervention.

[0194] In some embodiments, the Subject’s MoCA is increased from Baseline (day 1 at the initial administration by day 36 following the initial intervention. In some embodiments, the Subject’s MoCA is increased from Baseline (day 1 at the initial administration by about day 31, 32, 33, 34, 35, 36, 37, 38, 39, 40, or 41, following the initial intervention, or at a time point that is in a range that is defined by any two of the preceding values. For example, in some embodiments, the Subject’s MoCA is increased from Baseline (day 1 at the initial administration by about days 31-41, 31 to 38, 31 to 36, 31 to 33, 33 to 41, 33 to 38, 33 to 36, 34 to 41, 34 to 37, or 37 to 41. In some embodiments, the subject’s increased MoCA is sustained from day 36 through day 64 following the initial intervention. In some embodiments, the subject’s increased MoCA is sustained from day 36 through day 104 following the initial intervention. In some embodiments, the subject’s increased MoCA is sustained from about day 31, 32, 33, 34, 35, 36, 37, 38, 39, 40, or 41 through about day 99, 100, 101, 102, 103, 104, 105, 105, 107, 108, or 109 following the initial intervention. In some embodiments, the subject’s increased MoCA is sustained from about month 1 to about month 2, 3, 4, 5, 6, 7, 8, 9, 10, 11, or 12, following the initial intervention, or for a period that is defined by any two of the preceding values. In some embodiments, the Subject’s MoCA increases within one month of the initial intervention. In some embodiments, the Subject’s increased MoCA is sustained for greater than about 3, 4, 5, 6, 7, 8, 9 10, 11, or 12 months following the initial intervention.

[0195] In some embodiments, administration of the anti-Gal3 antibody or binding fragment thereof to the subject increases the subject’s MoCA by about 1, 2, 3, 4, 5, 6, 7, 8, 9, 10, 11, 12, 13, 14, 15, 16, 17, 18, 19, 20, 21, 22, 23, 24, 25, 26, 27, 28, 29, or 30, points, or by a range that is defined by any two of the preceding values. For example, in some embodiments, administration of the anti-Gal3 antibody or binding fragment thereof to the subject increases the subject’s MoCA by between about 1 and 30, 1 and 20, 1 and 15, 1 and 10, 1 and 5, 5 and 30, 5 and 20, 5 and 15, 5 and 10, 10 and 30, 10 and 15, 15 and 30, 15 and 20, or 20 and 30 points. In some embodiments, administration of the anti-Gal3 antibody or binding fragment thereof to the subject increases the subject’s MoCA by about 1, 2, 3, 4, 5, 6, 7, 8, 9, 10, 15, 20, 25, 30, 40, 50, 60, 70, 75, 80, 90, 100, 200, 250, 300, 400, 500, 600, 700, 750, 800, 900, or 1000%, or by a range that is defined by any two of the preceding values. For example, in some embodiments, administration of the anti-Gal3 antibody or binding fragment thereof to the subject increases the subject’s MoCA by between about 1 and 1000, 1 and 750, 1 and 500, 1 and 250, 1 and 100, 1 and 75, 1 and 50, 1 and 25, 1 and 10, 1 and 5, 5 and 1000, 5 and 750, 5 and 500, 5 and 250, 5 and 100, 5 and 75, 5 and 50, 5 and 10, 10 and 1000, 10 and 750, 10 and 500, 10 and 250, 10 and 100, 10 and 75, 10 and 50, 10 and 25, 25 and 1000, 25 and 750, 25 and 500, 25 and 250, 25 and 100, 25 and 75, 25 and 50, 50 and 1000, 50 and 750, 50 and 500, 50 and 250, 50 and 100, 100 and 1000, 100 and 750, 100 and 500, 100 and 250, 250 and 1000, 250 and 750, 250 and 500, 500 and 1000, 500 and 750, or 750 and 1000%.

[0196] In some embodiments, administration of the anti-Gal3 antibody or binding fragment thereof to the subject prevents the stroke (which also may involve reducing the severity of a stroke that occurs). In some embodiments, administration of the anti-Gal3 antibody or binding fragment thereof prevents loss of locomotor dysfunction, prevents incidence of microhemorrhage, prevents elevation of levels of activated microglia, prevents elevation of levels of activated astrocytes, prevents elevation of circulating proinflammatory immune cells, prevents elevation of circulating proinflammatory cytokines, or any combination thereof, in the subject.

[0197] In some embodiments, administration of the anti-Gal3 antibody or binding fragment thereof to the subject reduces the chances of the stroke or reduces the chances of a severe stroke by at least 5%, 10%, 20%, 30%, 40%, 50%, 60%, 70%, 80%, 90%, 95%, 96%, 97%, 98%, 99%, or any percentage within a range defined by any two of the aforementioned reductions. In some embodiments, administration of the anti-Gal3 antibody or binding fragment thereof to the subject reduces the chances of the stroke or reduces the chances of a severe stroke by at least 50%, 60%, 70%, 80%, 90%, 95%, 96%, 97%, 98%, 99% or higher or any percentage within a range defined by any two of the aforementioned reductions.

[0198] In some embodiments, administration of the anti-Gal3 antibody or binding fragment thereof to the subject treats the stroke. In some embodiments, administration of the anti-Gal3 antibody or binding fragment thereof reduces locomotor dysfunction, reduces microhemorrhage, reduces levels of activated microglia, reduces levels of activated astrocytes, reduces levels of circulating proinflammatory immune cells, reduces levels of circulating proinflammatory cytokines, or any combination thereof, in the subject.

[0199] In some embodiments, the reduction in locomotor dysfunction, reduction in microhemorrhage, reduction in levels of activated microglia, reduction in levels of activated astrocytes, reduction in levels of circulating proinflammatory cytokines, or any combination thereof, in the subject, is by at least 5%, 10%, 20%, 30%, 40%, 50%, 60%, 70%, 80%, 90%, 95%, 96%, 97%, 98%, 99% or higher or any percentage within a range defined by any two of the aforementioned reductions. In some embodiments, the reduction in locomotor dysfunction in the subject is by at least 50%. In some embodiments, the reduction in locomotor dysfunction is assessed by the Fugl-Meyer Assessment (FMA), Motor Assessment Scale (MAS), and/or the Chedoke-McMaster Stroke Assessment (CMSA). In some embodiments, the reduction in microhemorrhage in the subject is by at least 50%. In some embodiments, the reduction in microhemorrhage is assessed by neuroimaging, MRI, and/or Prussian blue staining. In some embodiments, the reduction in levels of activated microglia in the subject is by at least 20%. In some embodiments, the reduction in levels of activated microglia is assessed by detection of microglia activation markers. In some embodiments, the microglia activation markers include but are not limited to ionized calcium-binding adaptor molecule 1 (Iba1), monocyte chemoattractant protein-1 (MCP-1), chitinase-3-like protein 1 (YKL-40), and/or soluble CD14 (sCD14). In some embodiments, the microglia activation markers are detected in the cerebrospinal fluid of the subject. In some embodiments, the reduction in levels of activated astrocytes in the subject is by at least 30%. In some embodiments, the reduction in levels of activated astrocytes is assessed by detection of astrocyte activation markers. In some embodiments, the astrocyte activation markers include but are not limited to GFAP. In some embodiments, the astrocyte activation markers are detected in the cerebrospinal fluid of the subject. In some embodiments, the proinflammatory immune cells comprise NK cells, monocytes, and/or lymphocytes. In some embodiments, the proinflammatory cytokines include but are not limited to IL-6 and/or IL1β.

[0200] In some embodiments, the anti-Gal3 antibody or binding fragment thereof is administered with one or more additional therapeutic compositions, such as those for the treatment of stroke. In some embodiments, the stroke is ischemic stroke, thrombotic stroke, embolic stroke, or transient ischemic attack, and the one or more additional therapeutic compositions comprise thrombolytics, tissue plasminogen activator (tPA), alteplase, reteplase, tenecteplase, desmoteplase, anticoagulants, ACE inhibitors, antihypertensives, nicardipine, or any combination thereof. In some embodiments, the stroke is hemorrhagic stroke, intracerebral hemorrhage, or subarachnoid hemorrhage, and the one or more additional therapeutic compositions comprise antihypertensives, or nicardipine, or any combination thereof. The administration of the anti-Gal3 antibody or binding fragment thereof may also be accompanied with surgery.

[0201] In addition to the methods for selecting the subject as having the stroke or at risk of contracting the stroke, and/or detecting an amelioration of symptoms associated with the stroke, alternative approaches can also be used. These approaches may include the Action Research Arm Test, Barthel Index, Berg Balance Scale, Box and Block Test, Chedoke McMaster Stroke Assessment Scale, Chedoke Arm and Hand Activity Inventory, Clinical Outcome Variables Scale, Functional Ambulation Categories, Functional Independence Measure, Frenchay Activities Index, Motor Assessment Scale, Motricity Test, Nine-hole Peg Test, Rankin Handicap Scale, Rivermead Mobility Scale, Rivermead Motor Assessment, Six Minute Walk Test, Timed Up and Go, and/or Wolf Motor Function Test. Other approaches may involve analysis of inflammatory components from blood or cerebrospinal fluid samples from the patient. These inflammatory components may include immune cells, such as leukocytes, NK cells, monocytes, lymphocytes, and the like, or pro-inflammatory cytokines. The use of any one or more of these approaches to assess the incidence or risk of stroke may be dependent on the discretion of a trained medical professional.

[0202] In some embodiments, the anti-Gal3 antibody or binding fragment thereof is or comprises any one or more of the sequences illustrated in FIGS. 3A-C, 4A-C, 5, 6, 7, 8, or 9, includes any 1, 2, 3, 4, 5, or 6 of the CDRs in SEQ ID NOs: 27-538, 801-865, and/or includes one or both of the VH/VL in SEQ ID NOs: 297-447, 803-865, 926-929. In some embodiments, the anti-Gal3 antibody or binding fragment thereof includes 1, 2, 3, 4, 5, or 6 of the V_{H}-CDR1, V_{H}-CDR2, V_{H}-CDR3, V_{L}-CDR1, V_{L}-CDR2, and/or V_{L}-CDR3 of SEQ ID NOs: 27, 71, 112, 170, 221, 248. In some embodiments, the anti-Gal3 antibody or binding fragment thereof includes 1, 2, 3, 4, 5, or 6 of the V_{H}-CDR1, V_{H}-CDR2, V_{H}-CDR3, V_{L}-CDR1, V_{L}-CDR2, and/or V_{L}-CDR3 of SEQ ID NOs: 31, 72, 113, 171, 222, 249. In some embodiments, the anti-Gal3 antibody or binding fragment thereof includes 1, 2, 3, 4, 5, or 6 of the V_{H}-CDR1, V_{H}-CDR2, V_{H}-CDR3, V_{L}-CDR1, V_{L}-CDR2, and/or V_{L}-CDR3 of SEQ ID NOs: 30, 86, 130, 189, 230, 263. In some embodiments, the anti-Gal3 antibody or binding fragment thereof includes 1, 2, 3, 4, 5, or 6 of the V_{H}-CDR1, V_{H}-CDR2, V_{H}-CDR3, V_{L}-CDR1, V_{L}-CDR2, and/or V_{L}-CDR3 of SEQ ID NOs: 34, 74, 116, 174, 225, 252. In some embodiments, the anti-Gal3 antibody or binding fragment thereof includes 1, 2, 3, 4, 5, or 6 of the V_{H}-CDR1, V_{H}-CDR2, V_{H}-CDR3, V_{L}-CDR1, V_{L}-CDR2, and/or V_{L}-CDR3 of SEQ ID NOs: 32, 84, 119, 186, 228, 255. In some embodiments, the anti-Gal3 antibody or binding fragment thereof includes 1, 2, 3, 4, 5, or 6 of the V_{H}-CDR1, V_{H}-CDR2, V_{H}-CDR3, V_{L}-CDR1, V_{L}-CDR2, and/or V_{L}-CDR3 of SEQ ID NOs: 37, 77, 118, 178, 229, 256. In some embodiments, the anti-Gal3 antibody or binding fragment thereof includes 1, 2, 3, 4, 5, or 6 of the V_{H}-CDR1, V_{H}-CDR2, V_{H}-CDR3, V_{L}-CDR1, V_{L}-CDR2, and/or V_{L}-CDR3 of SEQ ID NOs: 34, 74, 126, 187, 225, 252. In some embodiments, the anti-Gal3 antibody or binding fragment thereof includes 1, 2, 3, 4, 5, or 6 of the V_{H}-CDR1, V_{H}-CDR2, V_{H}-CDR3, V_{L}-CDR1, V_{L}-CDR2, and/or V_{L}-CDR3 of SEQ ID NOs: 66, 108, 164, 215, 225, 291.

[0203] Also disclosed herein are methods for inhibiting, reducing, preventing, and/or treating traumatic brain injury (TBI) in a subject in need thereof. The methods comprise administering an anti-Gal3 antibody or binding fragment thereof to the subject, thereby inhibiting, reducing, preventing, and/or treating the TBI.

[0204] In some embodiments, the methods further comprise selecting the subject as having the TBI or at risk of contracting the TBI prior to the administering step. In some embodiments, selecting the subject as having the TBI comprises assessing the subject for level of consciousness, memory loss, and/or the Glasgow Coma Scale, neuroimaging (such as CT or MRI) and/or detecting TBI biomarkers (including but not limited to GFAP and/or ubiquitin carboxy-terminal hydrolase L1 (UCH-L1). In some embodiments, the methods further comprise detecting an amelioration of symptoms associated with the TBI after the administering step. In some embodiments, the TBI is associated with a concussion, edema, diffuse axonal injury, spinal cord injury, coma, neuroinflammation, microhemorrhage, astrocytosis, activated microglia, and/or hematoma. In some embodiments, any of the methods disclosed herein involving an anti-Gal3 antibody or binding fragment can be performed with an antigen binding molecule that binds to Gal3.

[0205] In some embodiments, administration of the anti-Gal3 antibody or binding fragment thereof to the subject prevents the TBI, concussion, edema, diffuse axonal injury, spinal cord injury, coma, neuroinflammation, microhemorrhage, astrocytosis, activated microglia, and/or hematoma. This may also involve reducing the severity of the TBI, concussion, edema, diffuse axonal injury, spinal cord injury, coma, neuroinflammation, microhemorrhage, astrocytosis, activated microglia, and/or hematoma. In some embodiments, administration of the anti-Gal3 antibody or binding fragment thereof prevents elevation of levels of activated microglia, prevents elevation of levels of activated astrocytes, prevents elevation of levels of macrophages, prevents elevation of levels of hyperphosphorylated Tau, prevents incidence of microhemorrhage, prevents neuroinflammation, prevents elevation of levels of circulating proinflammatory cytokines, or any combination thereof, in the subject.

[0206] In some embodiments, administration of the anti-Gal3 antibody or binding fragment thereof to the subject reduces the chance of the TBI, concussion, edema, diffuse axonal injury, spinal cord injury, coma, neuroinflammation, microhemorrhage, astrocytosis, activated microglia, and/or hematoma or reduces the chances of a severe form of said conditions by at least 5%, 10%, 20%, 30%, 40%, 50%, 60%, 70%, 80%, 90%, or 95%, or any percentage within a range defined by any two of the aforementioned reductions. In some embodiments, administration of the anti-Gal3 antibody or binding fragment thereof to the subject reduces the chance of the TBI, concussion, edema, diffuse axonal injury, spinal cord injury, coma, neuroinflammation, microhemorrhage, astrocytosis, activated microglia, and/or hematoma or reduces the chances of a severe form of said conditions by at least 50%, 60%, 70%, 80%, 90%, 95%, 96%, 97%, 98%, 99% or higher, or any percentage within a range defined by any two of the aforementioned reductions.

[0207] In some embodiments, administration of the anti-Gal3 antibody or binding fragment thereof to the subject treats the TBI, concussion, edema, diffuse axonal injury, spinal cord injury, coma, neuroinflammation, microhemorrhage, astrocytosis, activated microglia, and/or hematoma. In some embodiments, administration of the anti-Gal3 antibody or binding fragment thereof improves the level of consciousness, memory loss, and/or the Glasgow Coma Scale of the patient; and/or reduces levels of activated microglia, reduces levels of activated astrocytes, reduces levels of macrophages, reduces levels of hyperphosphorylated Tau, reduces microhemorrhage, reduces neuroinflammation, reduces levels of circulating proinflammatory cytokines or any combination thereof, in the subject.

[0208] In some embodiments, the reduction in levels of activated microglia, reduction in levels of activated astrocytes, reduction in levels of macrophages, reduction in levels of hyperphosphorylated Tau, reduction in microhemorrhage, reduction in neuroinflammation, reduction in levels of circulating proinflammatory cytokines, or any combination thereof, in the subject, is by at least 5%, 10%, 20%, 30%, 40%, 50%, 60%, 70%, 80%, 90%, 95%, 96%, 97%, 98%, 99% or higher, or any percentage within a range defined by any two of the aforementioned reductions. In some embodiments, the reduction in levels of activated microglia in the subject is by at least 70%. In some embodiments, the reduction in levels of activated microglia is assessed by detection of microglia activation markers. In some embodiments, the microglia activation markers include but are not limited to ionized calcium-binding adaptor molecule 1 (Ibal), monocyte chemoattractant protein-1 (MCP-1), chitinase-3-like protein 1 (YKL-40), and/or soluble CD14 (sCD14). In some embodiments, the microglia activation markers are detected in the cerebrospinal fluid of the subject. In some embodiments, the reduction in levels of activated astrocytes in the subject is by at least 90%. In some embodiments, the reduction in levels of activated astrocytes is assessed by detection of astrocyte activation markers. In some embodiments, the astrocyte activation markers include but are not limited to GFAP. In some embodiments, the astrocyte activation markers are detected in the cerebrospinal fluid of the subject. In some embodiments, the reduction in levels of macrophages in the subject is by at least 70%. In some embodiments, the reduction in levels of macrophages is assessed by detection of macrophage activation markers. In some embodiments, the macrophage activation markers include but are not limited to CD68. In some embodiments, the macrophage activation markers are detected in the cerebrospinal fluid of the subject. In some embodiments, the reduction in levels of hyperphosphorylated Tau in the subject is by at least 80%. In some embodiments, the reduction in levels of microhemorrhage in the subject is by at least 80%. In some embodiments, the reduction in levels of microhemorrhage is assessed by neuroimaging, MRI, and/or Prussian blue staining. In some embodiments, the reduction in neuroinflammation in the subject is by at least 70%. In some embodiments, the proinflammatory cytokines comprise IL-6, IL-10, and/or TNF-α.

[0209] In some embodiments, the anti-Gal3 antibody or binding fragment thereof is administered with one or more additional therapeutic compositions, such as those for treating TBI. In some embodiments, the one or more additional therapeutic compositions comprise levodopa, bromocriptine, NMDA receptor antagonists, amantadine, memantine, cholinesterase inhibitors, tacrine, rivastigmine, galantamine, donepezil, or any combination thereof. The administration of the anti-Gal3 antibody or binding fragment thereof may also be accompanied with surgery.

[0210] In some embodiments, the anti-Gal3 antibody or binding fragment thereof is or comprises any one or more of the sequences illustrated in FIGS. 3A-C, 4A-C, 5, 6, 7, 8, or 9, includes any 1, 2, 3, 4, 5, or 6 of the CDRs in SEQ ID NOs: 27-538, 801-865, and/or includes one or both of the VH/VL in SEQ ID NOs: 297-447, 803-865, 926-929. In some embodiments, the anti-Gal3 antibody or binding fragment thereof includes 1, 2, 3, 4, 5, or 6 of the V_{H}-CDR1, V_{H}-CDR2, V_{H}-CDR3, V_{L}-CDR1, V_{L}-CDR2, and/or V_{L}-CDR3 of SEQ ID NOs: 27, 71, 112, 170, 221, 248. In some embodiments, the anti-Gal3 antibody or binding fragment thereof includes 1, 2, 3, 4, 5, or 6 of the V_{H}-CDR1, V_{H}-CDR2, V_{H}-CDR3, V_{L}-CDR1, V_{L}-CDR2, and/or V_{L}-CDR3 of SEQ ID NOs: 31, 72, 113, 171, 222, 249. In some embodiments, the anti-Gal3 antibody or binding fragment thereof includes 1, 2, 3, 4, 5, or 6 of the V_{H}-CDR1, V_{H}-CDR2, V_{H}-CDR3, V_{L}-CDR1, V_{L}-CDR2, and/or V_{L}-CDR3 of SEQ ID NOs: 30, 86, 130, 189, 230, 263. In some embodiments, the anti-Gal3 antibody or binding fragment thereof includes 1, 2, 3, 4, 5, or 6 of the V_{H}-CDR1, V_{H}-CDR2, V_{H}-CDR3, V_{L}-CDR1, V_{L}-CDR2, and/or V_{L}-CDR3 of SEQ ID NOs: 34, 74, 116, 174, 225, 252. In some embodiments, the anti-Gal3 antibody or binding fragment thereof includes 1, 2, 3, 4, 5, or 6 of the V_{H}-CDR1, V_{H}-CDR2, V_{H}-CDR3, V_{L}-CDR1, V_{L}-CDR2, and/or V_{L}-CDR3 of SEQ ID NOs: 32, 84, 119, 186, 228, 255. In some embodiments, the anti-Gal3 antibody or binding fragment thereof includes 1, 2, 3, 4, 5, or 6 of the V_{H}-CDR1, V_{H}-CDR2, V_{H}-CDR3, V_{L}-CDR1, V_{L}-CDR2, and/or V_{L}-CDR3 of SEQ ID NOs: 37, 77, 118, 178, 229, 256. In some embodiments, the anti-Gal3 antibody or binding fragment thereof includes 1, 2, 3, 4, 5, or 6 of the V_{H}-CDR1, V_{H}-CDR2, V_{H}-CDR3, V_{L}-CDR1, V_{L}-CDR2, and/or V_{L}-CDR3 of SEQ ID NOs: 34, 74, 126, 187, 225, 252. In some embodiments, the anti-Gal3 antibody or binding fragment thereof includes 1, 2, 3, 4, 5, or 6 of the V_{H}-CDR1, V_{H}-CDR2, V_{H}-CDR3, V_{L}-CDR1, V_{L}-CDR2, and/or V_{L}-CDR3 of SEQ ID NOs: 66, 108, 164, 215, 225, 291.

[0211] Also disclosed herein are methods for inhibiting, reducing, preventing, and/or treating a disorder associated with fibrin activity or dysfunction in a subject in need thereof. The methods comprise administering an anti-Gal3 antibody or binding fragment thereof to the subject, thereby inhibiting, reducing, preventing, and/or treating the disorder associated with fibrin activity or dysfunction.

[0212] In some embodiments, the disorder associated with fibrin activity or dysfunction comprises atherosclerosis, thrombosis, thromboembolism, carotid artery disease, coronary artery disease, peripheral artery disease, myocardial infarction, heart failure, heart attack, hypertension, chronic kidney disease, coagulopathy, or thrombocytopathy. In some embodiments, the disorder associated with fibrin activity or dysfunction is atherosclerosis. In some embodiments, the disorder associated with fibrin activity or dysfunction is thrombosis. In some embodiments, the disorder associated with fibrin activity or dysfunction is thromboembolism. In some embodiments, the disorder associated with fibrin activity or dysfunction is carotid artery disease. In some embodiments, the disorder associated with fibrin activity or dysfunction is coronary artery disease. In some embodiments, the disorder associated with fibrin activity or dysfunction is peripheral artery disease. In some embodiments, the disorder associated with fibrin activity or dysfunction is myocardial infarction. In some embodiments, the disorder associated with fibrin activity or dysfunction is heart failure. In some embodiments, the disorder associated with fibrin activity or dysfunction is chronic kidney disease. In some embodiments, the disorder associated with fibrin activity or dysfunction is coagulopathy. In some embodiments, the disorder associated with fibrin activity or dysfunction is thrombocytopathy. In some embodiments, the methods further comprise selecting the subject as having the disorder associated with fibrin activity or dysfunction or at risk of contracting the disorder associated with fibrin activity or dysfunction prior to the administering step. In some embodiments, selecting the subject as having the disorder associated with fibrin activity or dysfunction comprises detecting thrombotic biomarkers. In some embodiments, the thrombotic biomarkers include but are not limited to fibrinogen, C-reactive protein (CRP), and/or plasminogen activator inhibitor-1 (PAI-1). In some embodiments, the methods further comprise detecting an amelioration of symptoms associated with the disorder associated with fibrin activity or dysfunction after the administering step. In some embodiments, any of the methods disclosed herein involving an anti-Gal3 antibody or binding fragment can be performed with an antigen binding molecule that binds to Gal3.

[0213] In some embodiments, administration of the anti-Gal3 antibody or binding fragment thereof to the subject prevents neuroinflammation and/or fibrin oligomerization, in the subject. In some embodiments, administration of the anti-Gal3 antibody or binding fragment thereof to the subject reduces neuroinflammation and/or fibrin oligomerization in the subject.

[0214] In some embodiments, the reduction in neuroinflammation and/or the reduction in fibrin oligomerization, in the subject, is by at least 5%, 10%, 20%, 30%, 40%, 50%, 60%, 70%, 80%, 90%, or 95%, or any percentage within a range defined by any two of the aforementioned reductions.

[0215] In some embodiments, the anti-Gal3 antibody or binding fragment thereof is administered with one or more additional therapeutic compositions, such as those used for treating a disorder associated with fibrin activity or dysfunction, atherosclerosis, thrombosis, thromboembolism, carotid artery disease, coronary artery disease, peripheral artery disease, myocardial infarction, heart failure, heart attack, hypertension, chronic kidney disease, coagulopathy, or thrombocytopathy. In some embodiments, the one or more additional therapeutic compositions comprises anti-clotting agents, aspirin, statins, antihypertensives, diuretics, calcium channel blockers, ACE inhibitors, angiotensin II receptor antagonists, adrenergic receptor antagonists, vasodilators, renin inhibitors, aldosterone receptor antagonists, endothelium receptor blockers, or any combination thereof. The administration of the anti-Gal3 antibody or binding fragment thereof may also be accompanied with surgery.

[0216] In addition to the indications provided herein, the anti-Gal3 antibodies and binding fragments thereof are also envisioned to be effective for related indications, such as those related to inflammation where a subject would benefit from a reduction in proinflammatory cytokines. In some embodiments are provided methods for inhibiting, reducing, preventing, and/or treating a disorder associated with inflammation and elevation of proinflammatory cytokines in a subject in need thereof. The methods comprise administering an anti-Gal3 antibody or binding fragment thereof to the subject, thereby treating the disorder associated with inflammation. In some embodiments, the administration reduces proinflammatory cytokines, such as circulating cytokines, in the subject.

[0217] In some embodiments, the anti-Gal3 antibody or binding fragment thereof is or comprises any one or more of the sequences illustrated in FIGS. 3A-C, 4A-C, 5, 6, 7, 8, or 9, includes any 1, 2, 3, 4, 5, or 6 of the CDRs in SEQ ID NOs: 27-538, 801-865, and/or includes one or both of the VH/VL in SEQ ID NOs: 297-447, 803-865, 926-929. In some embodiments, the anti-Gal3 antibody or binding fragment thereof includes 1, 2, 3, 4, 5, or 6 of the V_{H}-CDR1, V_{H}-CDR2, V_{H}-CDR3, V_{L}-CDR1, V_{L}-CDR2, and/or V_{L}-CDR3 of SEQ ID NOs: 27, 71, 112, 170, 221, 248. In some embodiments, the anti-Gal3 antibody or binding fragment thereof includes 1, 2, 3, 4, 5, or 6 of the V_{H}-CDR1, V_{H}-CDR2, V_{H}-CDR3, V_{L}-CDR1, V_{L}-CDR2, and/or V_{L}-CDR3 of SEQ ID NOs: 31, 72, 113, 171, 222, 249. In some embodiments, the anti-Gal3 antibody or binding fragment thereof includes 1, 2, 3, 4, 5, or 6 of the V_{H}-CDR1, V_{H}-CDR2, V_{H}-CDR3, V_{L}-CDR1, V_{L}-CDR2, and/or V_{L}-CDR3 of SEQ ID NOs: 30, 86, 130, 189, 230, 263. In some embodiments, the anti-Gal3 antibody or binding fragment thereof includes 1, 2, 3, 4, 5, or 6 of the V_{H}-CDR1, V_{H}-CDR2, V_{H}-CDR3, V_{L}-CDR1, V_{L}-CDR2, and/or V_{L}-CDR3 of SEQ ID NOs: 34, 74, 116, 174, 225, 252. In some embodiments, the anti-Gal3 antibody or binding fragment thereof includes 1, 2, 3, 4, 5, or 6 of the V_{H}-CDR1, V_{H}-CDR2, V_{H}-CDR3, V_{L}-CDR1, V_{L}-CDR2, and/or V_{L}-CDR3 of SEQ ID NOs: 32, 84, 119, 186, 228, 255. In some embodiments, the anti-Gal3 antibody or binding fragment thereof includes 1, 2, 3, 4, 5, or 6 of the V_{H}-CDR1, V_{H}-CDR2, V_{H}-CDR3, V_{L}-CDR1, V_{L}-CDR2, and/or V_{L}-CDR3 of SEQ ID NOs: 37, 77, 118, 178, 229, 256. In some embodiments, the anti-Gal3 antibody or binding fragment thereof includes 1, 2, 3, 4, 5, or 6 of the V_{H}-CDR1, V_{H}-CDR2, V_{H}-CDR3, V_{L}-CDR1, V_{L}-CDR2, and/or V_{L}-CDR3 of SEQ ID NOs: 34, 74, 126, 187, 225, 252. In some embodiments, the anti-Gal3 antibody or binding fragment thereof includes 1, 2, 3, 4, 5, or 6 of the V_{H}-CDR1, V_{H}-CDR2, V_{H}-CDR3, V_{L}-CDR1, V_{L}-CDR2, and/or V_{L}-CDR3 of SEQ ID NOs: 66, 108, 164, 215, 225, 291.

[0218] As applied to any of the methods comprising administering an anti-Gal3 antibody or binding fragment thereof to a subject disclosed herein, in some embodiments, administering an anti-Gal3 antibody or binding fragment thereof to the subject comprises administration of one or more unit doses of the anti-Gal3 antibody or binding fragment thereof, optionally 1, 2, 3, 4, 5, 6, 7, 8, 9, or 10 unit doses. In some embodiments, 5, 6, 7, 8, 9, or 10 unit doses are administered. In some embodiments, 5 unit doses are administered. In some embodiments, 8 unit doses are administered. In some embodiments, the one or more unit doses comprise 50, 60, 70, 80, 90, 100, 200, 300, 400, 500, 600, 700, 800, 900, 1000, 1100, 1200, 1300, 1400, 1500, 1600, 1700, 1800, 1900, 2000, 2500, 3000, 3500, 4000, 4500 or 5000 mg of the anti-Gal3 antibody or binding fragment thereof per unit dose, or any amount per unit dose within a range defined by any two of the aforementioned amounts per unit dose. In some embodiments, the one or more unit doses are between 70 to 5000 mg of the anti-Gal3 antibody or binding fragment thereof per unit dose. In some embodiments, the one or more unit doses comprise 800, 900, 1000, 1100, 1200, 1300, 1400, or 1500 mg of the anti-Gal3 antibody or binding fragment thereof per unit dose, or any amount per unit dose within a range defined by any two of the aforementioned amounts per unit dose. In some embodiments, the one or more unit doses comprise 1000 mg or about 1000 mg of the anti-Gal3 antibody or binding fragment thereof per unit dose. In some embodiments, the one or more unit doses comprise 1, 1.1, 1.2, 1.3, 1.4, 1.5, 1.6, 1.7, 1.8, 1.9, 2, 3, 4, 5, 6, 7, 8, 9, 10, 15, 20, 25, 30, 35, 40, 45, 50, 55, 60, 65, 70, 75, 80, 85, 90, 95, 100, 105, 110, 115, 120, 125, 130, 135, 140, 145, or 150 mg/kg weight of the subject, or any amount per unit dose within a range defined by any two of the aforementioned amounts per unit dose. In some embodiments, the one or more unit doses comprise 5, 6, 7, 8, 9, 10, 11, 12, 13, 14, or 15 mg/kg weight of the subject, or any amount per unit dose within a range defined by any two of the aforementioned amounts per unit dose. In some embodiments, the one or more unit doses comprise 10 mg/kg or about 10 mg/kg weight of the subject. In some embodiments, a combined total of 1000, 2000, 3000, 4000, 5000, 6000, 7000, 8000, 9000, or 10000 mg of anti-Gal3 antibody or binding fragment thereof is administered to the subject. In some embodiments, a combined total of 4000, 4500, 5000, 5500, or 6000 mg of anti-Gal3 antibody or binding fragment thereof is administered to the subject. In some embodiments, a combined total of 5000 mg of anti-Gal3 antibody or binding fragment thereof is administered to the subject. In some embodiments, the one or more unit doses are administered every 1, 2, 3, 4, 5, 6, or 7 days, or 1, 2, 3, or 4 weeks, or any interval within a range defined by any two of the aforementioned intervals. In some embodiments, the one or more unit doses are administered every 7 days or about 7 days. In some embodiments, the one or more unit doses comprise 1000 mg or about 1000 mg of the anti-Gal3 antibody or binding fragment thereof per unit dose and the unit doses are administered every 7 days or about 7 days. In some embodiments, 5 unit doses comprise 1000 mg or about 1000 mg of the anti-Gal3 antibody or binding fragment thereof per unit dose and the unit doses are administered every 7 days or about 7 days. In some embodiments, the one or more unit doses are administered over the course of 10, 20, 30, 40, 50, 60, 70, 80, 90, or 100 minutes, or any amount of time within a range defined by any two of the aforementioned durations. In some embodiments, the one or more unit doses are administered over the course of 60 minutes or about 60 minutes. In some embodiments, the anti-Gal3 antibody or binding fragment thereof is administered enterally, orally, intranasally, parenterally, intracranially, subcutaneously, intramuscularly, intradermally, or intravenously, or any combination thereof, optionally intravenously.

[0219] In some embodiments, the anti-Gal3 antibody or binding fragment thereof is or comprises any one or more of the sequences illustrated in FIGS. 3A-C, 4A-C, 5, 6, 7, 8, or 9, includes any 1, 2, 3, 4, 5, or 6 of the CDRs in SEQ ID NOs: 27-538, 801-865, and/or includes one or both of the VH/VL in SEQ ID NOs: 297-447, 803-865, 926-929. In some embodiments, the anti-Gal3 antibody or binding fragment thereof includes 1, 2, 3, 4, 5, or 6 of the V_{H}-CDR1, V_{H}-CDR2, V_{H}-CDR3, V_{L}-CDR1, V_{L}-CDR2, and/or V_{L}-CDR3 of SEQ ID NOs: 27, 71, 112, 170, 221, 248. In some embodiments, the anti-Gal3 antibody or binding fragment thereof includes 1, 2, 3, 4, 5, or 6 of the V_{H}-CDR1, V_{H}-CDR2, V_{H}-CDR3, V_{L}-CDR1, V_{L}-CDR2, and/or V_{L}-CDR3 of SEQ ID NOs: 31, 72, 113, 171, 222, 249. In some embodiments, the anti-Gal3 antibody or binding fragment thereof includes 1, 2, 3, 4, 5, or 6 of the V_{H}-CDR1, V_{H}-CDR2, V_{H}-CDR3, V_{L}-CDR1, V_{L}-CDR2, and/or V_{L}-CDR3 of SEQ ID NOs: 30, 86, 130, 189, 230, 263. In some embodiments, the anti-Gal3 antibody or binding fragment thereof includes 1, 2, 3, 4, 5, or 6 of the V_{H}-CDR1, V_{H}-CDR2, V_{H}-CDR3, V_{L}-CDR1, V_{L}-CDR2, and/or V_{L}-CDR3 of SEQ ID NOs: 34, 74, 116, 174, 225, 252. In some embodiments, the anti-Gal3 antibody or binding fragment thereof includes 1, 2, 3, 4, 5, or 6 of the V_{H}-CDR1, V_{H}-CDR2, V_{H}-CDR3, V_{L}-CDR1, V_{L}-CDR2, and/or V_{L}-CDR3 of SEQ ID NOs: 32, 84, 119, 186, 228, 255. In some embodiments, the anti-Gal3 antibody or binding fragment thereof includes 1, 2, 3, 4, 5, or 6 of the V_{H}-CDR1, V_{H}-CDR2, V_{H}-CDR3, V_{L}-CDR1, V_{L}-CDR2, and/or V_{L}-CDR3 of SEQ ID NOs: 37, 77, 118, 178, 229, 256. In some embodiments, the anti-Gal3 antibody or binding fragment thereof includes 1, 2, 3, 4, 5, or 6 of the V_{H}-CDR1, V_{H}-CDR2, V_{H}-CDR3, V_{L}-CDR1, V_{L}-CDR2, and/or V_{L}-CDR3 of SEQ ID NOs: 34, 74, 126, 187, 225, 252. In some embodiments, the anti-Gal3 antibody or binding fragment thereof includes 1, 2, 3, 4, 5, or 6 of the V_{H}-CDR1, V_{H}-CDR2, V_{H}-CDR3, V_{L}-CDR1, V_{L}-CDR2, and/or V_{L}-CDR3 of SEQ ID NOs: 66, 108, 164, 215, 225, 291.

[0220] As applied to any of the methods comprising administering an anti-Gal3 antibody or binding fragment thereof, in some embodiments, the anti-Gal3 antibody or binding fragment thereof selectively binds to an N-terminal domain of Gal3. In some embodiments, the anti-Gal3 antibody or binding fragment thereof binds to Peptide 1 (SEQ ID NO: 3), Peptide 6 (SEQ ID NO: 8), or Peptide 7 (SEQ ID NO:9), or any combination thereof. In some embodiments, the anti-Gal3 antibody or binding fragment thereof comprises (1) a heavy chain variable region comprising a V_{H}-CDR1, a V_{H}-CDR2, and a V_{H}-CDR3; and (2) a light chain variable region comprising a V_{L}-CDR1, a V_{L}-CDR2, and a V_{L}-CDR3. In some embodiments, the V_{H}-CDR1 comprises an amino acid sequence having at least 80%, 81%, 82%, 83%, 84%, 85%, 86%, 87%, 88%, 89%, 90%, 91%, 92%, 93%, 94%, 95%, 96%, 97%, 98%, 99%, or 100% identity to any one of the amino acid sequences of SEQ ID NOs: 27-70. In some embodiments, the V_{H}-CDR2 comprises an amino acid sequence having at least 80%, 81%, 82%, 83%, 84%, 85%, 86%, 87%, 88%, 89%, 90%, 91%, 92%, 93%, 94%, 95%, 96%, 97%, 98%, 99%, or 100% identity to any one of the amino acid sequences of SEQ ID NOs: 71-111, 801. In some embodiments, the V_{H}-CDR3 comprises an amino acid sequence having at least 80%, 81%, 82%, 83%, 84%, 85%, 86%, 87%, 88%, 89%, 90%, 91%, 92%, 93%, 94%, 95%, 96%, 97%, 98%, 99%, or 100% identity to any one of the amino acid sequences of SEQ ID NOs: 112-169, 802. In some embodiments, the V_{L}-CDR1 comprises an amino acid sequence having at least 80%, 81%, 82%, 83%, 84%, 85%, 86%, 87%, 88%, 89%, 90%, 91%, 92%, 93%, 94%, 95%, 96%, 97%, 98%, 99%, or 100% identity to any one of the amino acid sequences of SEQ ID NOs: 170-220. In some embodiments, the V_{L}-CDR2 comprises an amino acid sequence having at least 80%, 81%, 82%, 83%, 84%, 85%, 86%, 87%, 88%, 89%, 90%, 91%, 92%, 93%, 94%, 95%, 96%, 97%, 98%, 99%, or 100% identity to any one of the amino acid sequences of SEQ ID NOs: 221-247. In some embodiments, the V_{L}-CDR3 comprises an amino acid sequence having at least 80%, 81%, 82%, 83%, 84%, 85%, 86%, 87%, 88%, 89%, 90%, 91%, 92%, 93%, 94%, 95%, 96%, 97%, 98%, 99%, or 100% identity to any one of the amino acid sequences of SEQ ID NOs: 248-296. In some embodiments, the anti-Gal3 antibody or binding fragment thereof comprises a combination of the V_{H}-CDR1, V_{H}-CDR2, V_{H}-CDR3, V_{L}-CDR1, V_{L}-CDR2, and V_{L}-CDR3 as illustrated in FIG. 7. In some embodiments, the heavy chain variable region comprises a sequence having at least 80%, 81%, 82%, 83%, 84%, 85%, 86%, 87%, 88%, 89%, 90%, 91%, 92%, 93%, 94%, 95%, 96%, 97%, 98%, or 99% identity to the sequence selected from SEQ ID NOs: 297-373, 803, 806-820. In some embodiments, the light chain variable region comprises a sequence having at least 80%, 81%, 82%, 83%, 84%, 85%, 86%, 87%, 88%, 89%, 90%, 91%, 92%, 93%, 94%, 95%, 96%, 97%, 98%, or 99% identity to the sequence selected from SEQ ID NOs: 374-447, 821-835. In some embodiments, the anti-Gal3 antibody or binding fragment thereof comprises a heavy chain, wherein the heavy chain comprises a sequence having at least 80%, 81%, 82%, 83%, 84%, 85%, 86%, 87%, 88%, 89%, 90%, 91%, 92%, 93%, 94%, 95%, 96%, 97%, 98%, or 99% identity to the sequence selected from SEQ ID NOs: 448-494, 804, 836-850. In some embodiments, the anti-Gal3 antibody or binding fragment thereof comprises a light chain, wherein the light chain comprises a sequence having at least 80%, 81%, 82%, 83%, 84%, 85%, 86%, 87%, 88%, 89%, 90%, 91%, 92%, 93%, 94%, 95%, 96%, 97%, 98%, or 99% identity to the sequence selected from SEQ ID NOs: 495-538, 805, 851-865. In some embodiments, any of the methods disclosed herein involving an anti-Gal3 antibody or binding fragment can be performed with an antigen binding molecule that binds to Gal3.

[0221] As applied to any of the methods disclosed herein comprising administering an anti-Gal3 antibody or binding fragment thereof, in some embodiments, the anti-Gal3 antibody or binding fragment thereof is selected from the group consisting of: TB001, TB006, 12G5.D7, 13A12.2E5, 14H10.2C9, 15F10.2D6, 19B5.2E6, 20D11.2C6, 20H5.A3, 23H9.2E4, 2D10.2B2, 3B11.2G2, 7D8.2D8, mIMT001, 4A11.2B5, 4A11.H1L1, 4A11.H4L2, 4G2.2G6, 6B3.2D3, 6H6.2D6, 9H2.2H10, 13G4.2F8, 13H12.2F8, 15G7.2A7, 19D9.2E5, 23B10.2B12, 24D12.2H9, F846C.1B2, F846C.1F5, F846C.1H12, F846C.1H5, F846C.2H3, F846TC.14A2, F846TC.14E4, F846TC.16B5, F846TC.7F10, F847C.10B9, F847C.11B1, F847C.12F12, F847C.26F5, F847C.4B10, F849C.8D10, F849C.8H3, 846.2B11, 846.4D5, 846T.1H2, 847.14H4, 846.2D4, 846.2F11, 846T.10B1, 846T.2E3, 846T.4C9, 846T.4E11, 846T.4F5, 846T.8D1, 847.10C9, 847.11D6, 847.15D12, 847.15F9, 847.15H11, 847.20H7, 847.21B11, 847.27B9, 847.28D1, 847.2B8, 847.3B3, 849.1D2, 849.2D7, 849.2F12, 849.4B2, 849.4F12, 849.4F2, 849.5C2, 849.8D12, F847C.21H6, 849.5H1, 847.23F11, 847.16D10, 847.13E2-mH0mL1, 847.13E2-mH0mL2, 847.12C4, 847.4D3, 2D10-VH0-VL0, 2D10-hVH4-HVL1, 2D10-hVH4-HVL2, 2D10-hVH4-HVL3, 2D10-hVH4-HVL4, 2D10-hVH3-HVL1, 2D10-hVH3-HVL2, 2D10-hVH3-HVL3, 2D10-hVH3-HVL4, 20H5.A3-VH3VL1, 20H5.A3-VH3VL3, 20H5.A3-VH4VL1, 20H5.A3-VH5VL1, 20H5.A3-VH5VL3, 20H5.A3-VH6VL1, 20H5.A3-VH6VL3, or binding fragment thereof. In some embodiments, the anti-Gal3 antibody or binding fragment thereof comprises one or more of: TB001, TB006, F846C.1F5, F846TC.16B5, 14H10.2C9, 15G7.2A7, 20H5.A3, 19D9.2E5, 19B5.2E6, or F847C.21H6. In some embodiments, the anti-Gal3 antibody or binding fragment thereof comprises TB001. In some embodiments, the anti-Gal3 antibody or binding fragment thereof comprises TB006. In some embodiments, the anti-Gal3 antibody or binding fragment thereof comprises F846C.1F5. In some embodiments, the anti-Gal3 antibody or binding fragment thereof comprises F846TC.16B5. In some embodiments, the anti-Gal3 antibody or binding fragment thereof comprises 14H10.2C9. In some embodiments, the anti-Gal3 antibody or binding fragment thereof comprises 15G7.2A7. In some embodiments, the anti-Gal3 antibody or binding fragment thereof comprises 20H5.A3. In some embodiments, the anti-Gal3 antibody or binding fragment thereof comprises 19D9.2E5. In some embodiments, the anti-Gal3 antibody or binding fragment thereof comprises 19B5.2E6. In some embodiments, the anti-Gal3 antibody or binding fragment thereof comprises F847C.21H6. In some embodiments, any of the methods disclosed herein involving an anti-Gal3 antibody or binding fragment can be performed with an antigen binding molecule that binds to Gal3.

[0222] As applied to any of the methods of use disclosed herein, in some embodiments, the anti-Gal3 antibody or binding fragment thereof binds to one or more peptides of SEQ ID NOs: 3-26. In some embodiments, the anti-Gal3 antibody or binding fragment thereof binds to an epitope present within a region of Gal3 defined by Peptide 1 (ADNFSLHDALSGSGNPNPQG; SEQ ID NO: 3), Peptide 4 (GAGGYPGASYPGAYPGQAPP; SEQ ID NO: 6), Peptide 6 (GAYPGQAPPGAYPGAPGAYP; SEQ ID NO: 8), Peptide 7 (AYPGAPGAYPGAPAPGVYPG; SEQ ID NO: 9), or a combination thereof. In some embodiments, any of the methods disclosed herein involving an anti-Gal3 antibody or binding fragment can be performed with an antigen binding molecule that binds to Gal3.

[0223] As applied to any of the methods of use disclosed herein, in some embodiments, the anti-Gal3 antibody or binding fragment thereof binds to an epitope of Gal3 that includes a motif of GxYPG, where x is the amino acids alanine (A), glycine (G), or valine (V). In some embodiments, an anti-Gal3 antibody as described herein binds to an epitope of Gal3 that includes two GxYPG motifs separated by three amino acids, where x is A, G, or V. In some embodiments, any of the methods disclosed herein involving an anti-Gal3 antibody or binding fragment can be performed with an antigen binding molecule that binds to Gal3.

[0224] As applied to any of the methods of use disclosed herein, in some embodiments, exemplary V_{H}-CDR1 sequences are depicted in FIG. 3A. In some embodiments, exemplary V_{H}-CDR2 sequences are depicted in FIG. 3B. In some embodiments, exemplary V_{H}-CDR3 sequences are depicted in FIG. 3C. In some embodiments, exemplary V_{L}-CDR1 sequences are depicted in FIG. 4A. In some embodiments, exemplary V_{L}-CDR2 sequences are depicted in FIG. 4B. In some embodiments, exemplary V_{L}-CDR3 sequences are depicted in FIG. 4C. In some embodiments, any of the methods disclosed herein involving an anti-Gal3 antibody or binding fragment can be performed with an antigen binding molecule that binds to Gal3.

[0225] As applied to any of the methods of use disclosed herein, in some embodiments, the heavy chain variable region of any of the anti-Gal3 antibodies or binding fragments thereof disclosed herein comprises an amino acid sequence having at least 75%, 80%, 85%, 90%, 95%, or 100% sequence identity to any sequence according to SEQ ID NOs: 297-373, 803, 806-82. In some embodiments, the heavy chain variable region of any of the anti-Gal3 antibodies or binding fragments thereof disclosed herein is selected from the group consisting of SEQ ID NOs: 297-373, 803, 806-82. In some embodiments, exemplary V_{H} are depicted in FIG. 5. In some embodiments, any of the methods disclosed herein involving an anti-Gal3 antibody or binding fragment can be performed with an antigen binding molecule that binds to Gal3.

[0226] As applied to any of the methods of use disclosed herein, in some embodiments, the light chain variable region of any of the anti-Gal3 antibodies or binding fragments thereof disclosed herein comprises an amino acid sequence having at least 75%, 80%, 85%, 90%, 95%, or 100% sequence identity to any sequence according to SEQ ID NOs: 374-447, 821-835. In some embodiments, the light chain variable region of any of the anti-Gal3 antibodies or binding fragments thereof disclosed herein is selected from the group consisting of SEQ ID NOs: 374-447, 821-835. In some embodiments, exemplary V_{L} are depicted in FIG. 6. In some embodiments, any of the methods disclosed herein involving an anti-Gal3 antibody or binding fragment can be performed with an antigen binding molecule that binds to Gal3.

[0227] As applied to any of the methods of use disclosed herein, in some embodiments, the anti-Gal3 antibody or binding fragment thereof comprises the heavy chain sequence of any one of SEQ ID NOs: 448-494, 804, 836-850. In some embodiments, the anti-Gal3 antibody or binding fragment thereof comprises the light chain sequence of any one of SEQ ID NOs: 495-538, 805, 851-865. In some embodiments, any of the methods disclosed herein involving an anti-Gal3 antibody or binding fragment can be performed with an antigen binding molecule that binds to Gal3.

[0228] As applied to any of the methods of use disclosed herein, in some embodiments, the anti-Gal3 antibody or binding fragment thereof excludes the subset of named anti-Gal3 antibodies or binding fragments thereof depicted in any one of FIGS. 19A-D. In some embodiments, CDRs (including heavy chain and light chain CDRs), heavy chain variable regions, light chain variable regions, heavy chains, and/or light chains are excluded from the sequences associated with the subset of named anti-Gal3 antibodies or binding fragments thereof depicted in any one of FIGS. 19A-D. In some embodiments, combinations of CDRs (including heavy chain and light chain CDRs), heavy chain variable regions, light chain variable regions, heavy chains, and/or light chains are excluded from the sequences associated with the subset of named anti-Gal3 antibodies or binding fragments thereof depicted in any one of FIGS. 19A-D, or excludes any one or more of the CDRs, VH, VL, HC, and/or LC thereof. In some embodiments, the anti-Gal3 antibody or binding fragment thereof excludes those selected from the group of named anti-Gal3 antibody or binding fragment thereof depicted in FIG. 19A, or excludes any one or more of the CDRs, VH, VL, HC, and/or LC thereof. In some embodiments, the anti-Gal3 antibody or binding fragment thereof excludes those selected from the group of named anti-Gal3 antibody or binding fragment thereof depicted in FIG. 19B, or excludes any one or more of the CDRs, VH, VL, HC, and/or LC thereof. In some embodiments, the anti-Gal3 antibody or binding fragment thereof excludes those selected from the group of named anti-Gal3 antibody or binding fragment thereof depicted in FIG. 19C, or excludes any one or more of the CDRs, VH, VL, HC, and/or LC thereof. In some embodiments, the anti-Gal3 antibody or binding fragment thereof excludes those selected from the group of named anti-Gal3 antibody or binding fragment thereof depicted in FIG. 19D, or excludes any one or more of the CDRs, VH, VL, HC, and/or LC thereof.

[0229] As applied to any of the methods of use disclosed herein, in some embodiments, the anti-Gal3 antibody or binding fragment thereof is selected from the subset of named anti-Gal3 antibodies or binding fragments thereof depicted in any one of FIGS. 20A-D. In some embodiments, CDRs (including heavy chain and light chain CDRs), heavy chain variable regions, light chain variable regions, heavy chains, and/or light chains are selected from the sequences associated with the subset of named anti-Gal3 antibodies or binding fragments thereof depicted in any one of FIGS. 20A-D. In some embodiments, combinations of CDRs (including heavy chain and light chain CDRs), heavy chain variable regions, light chain variable regions, heavy chains, and/or light chains are selected from the sequences associated with the subset of named anti-Gal3 antibodies or binding fragments thereof depicted in any one of FIGS. 20A-D. In some embodiments, the anti-Gal3 antibody or binding fragment thereof is selected from the group of named anti-Gal3 antibody or binding fragment thereof depicted in FIG. 20A, or comprises any one or more of the CDRs, VH, VL, HC, and/or LC thereof. In some embodiments, the anti-Gal3 antibody or binding fragment thereof is selected from the group of named anti-Gal3 antibody or binding fragment thereof depicted in FIG. 20B, or comprises any one or more of the CDRs, VH, VL, HC, and/or LC thereof. In some embodiments, the anti-Gal3 antibody or binding fragment thereof is selected from the group of named anti-Gal3 antibody or binding fragment thereof depicted in FIG. 20C, or comprises any one or more of the CDRs, VH, VL, HC, and/or LC thereof. In some embodiments, the anti-Gal3 antibody or binding fragment thereof is selected from the group of named anti-Gal3 antibody or binding fragment thereof depicted in FIG. 20D, or comprises any one or more of the CDRs, VH, VL, HC, and/or LC thereof.

[0230] As applied to any of the methods of use disclosed herein, in some embodiments, the anti-Gal3 antibody or binding fragment thereof comprises a payload. In some embodiments, the payload is conjugated to the anti-Gal3 antibody or binding fragment thereof. In some embodiments, the payload is a cytotoxic payload, microtubule disrupting agent, DNA modifying agent, Akt inhibitor, polymerase inhibitor, detectable moiety, immunomodulatory agent, immune modulator, immunotoxin, nucleic acid polymer, aptamer, peptide, or any combination thereof. In some embodiments, the payload is a detectable moiety. In some embodiments, any of the methods disclosed herein involving an anti-Gal3 antibody or binding fragment can be performed with an antigen binding molecule that binds to Gal3.

[0231] As applied to any of the methods of use disclosed herein, in some embodiments, the anti-Gal3 antibody or binding fragment thereof is or comprises a humanized antibody. In some embodiments, the anti-Gal3 antibody or binding fragment thereof is or comprises a full-length antibody or a binding fragment thereof. In some embodiments, the anti-Gal3 antibody or binding fragment thereof is or comprises a bispecific antibody or a binding fragment thereof. In some embodiments, the anti-Gal3-antibody or binding fragment thereof is or comprises a monovalent Fab′, a divalent Fab2, a single-chain variable fragment (scFv), a diabody, a minibody, a nanobody, a single-domain antibody (sdAb), or a camelid antibody, or binding fragment thereof. In some embodiments, the anti-Gal3 antibody or binding fragment thereof is or comprises an IgG framework. In some embodiments, the anti-Gal3 antibody or binding fragment thereof is or comprises an IgG1, IgG2, or IgG4 framework. In some embodiments, any of the methods disclosed herein involving an anti-Gal3 antibody or binding fragment can be performed with an antigen binding molecule that binds to Gal3.

[0232] As applied to any of the methods of treatment disclosed herein, in some embodiments, in some embodiments, the anti-Gal3 antibody or binding fragment thereof is administered enterally, orally, intranasally, parenterally, intracranially, subcutaneously, intramuscularly, intradermally, or intravenously, or any combination thereof.

[0233] As applied to any of the methods of treatment disclosed herein, the subject is administered TB006 sterilized drug product supplied in 8 mL glass vials, sealed with a rubber stopper and an aluminum flip top, with strength of 160 mg (20 mg/mL, 8 mL) TB006 drug product per vial.

[0234] As applied to any of the methods of treatment disclosed herein, the subject is administered TB006 sterilized drug product via IV infusion over 60 minutes, after dilution in 0.9% Sodium Chloride Injection, USP (normal saline) to a final volume of 250 mL.

[0235] As applied to any of the methods of treatment disclosed herein, in some embodiments, the anti-Gal3 antibody or binding fragment thereof is formulated for systemic administration. In some embodiments, the anti-Gal3 antibody or binding fragment thereof is formulated for parenteral administration. In some embodiments, more than one anti-Gal3 antibody or binding fragment is administered. In some embodiments, when more than one anti-Gal3 antibody or binding fragment is administered, the more than one anti-Gal3 antibodies or binding fragments thereof may be selected from the anti-Gal3 antibodies or binding fragments thereof disclosed herein. In some embodiments, any of the methods disclosed herein involving an anti-Gal3 antibody or binding fragment can be performed with an antigen binding molecule that binds to Gal3.

[0236] As applied to any of the methods of use or treatment disclosed herein, the subject is a mammal. In some embodiments, the mammal is a human, cat, dog, mouse, rat, hamster, rodent, pig, cow, horse, sheep, or goat. In some embodiments, the mammal is a human.

### Therapeutic Regimens

[0237] In some embodiments, the anti-Gal3 antibodies or binding fragments thereof disclosed herein are administered for therapeutic applications. In some embodiments, the anti-Gal3 antibody or binding fragment thereof is administered once per day, twice per day, three times per day or more. The anti-Gal3 antibody or binding fragment thereof is administered daily, every day, every alternate day, five days a week, once a week, every other week, two weeks per month, three weeks per month, once a month, twice a month, three times per month, or more. In some embodiments, the anti-Gal3 antibody or binding fragment thereof is administered for at least 1 month, 2 months, 3 months, 4 months, 5 months, 6 months, 7 months, 8 months, 9 months, 10 months, 11 months, 12 months, 18 months, 2 years, 3 years, or more.

[0238] In the case wherein the patient’s status does improve, upon the doctor’s discretion the administration of the anti-Gal3 antibody or binding fragment thereof is given continuously; alternatively, the dose of the anti-Gal3 antibody or binding fragment thereof being administered is temporarily reduced or temporarily suspended for a certain length of time (i.e., a “drug holiday”). In some instances, the length of the drug holiday varies between 2 days and 1 year, including by way of example only, 2 days, 3 days, 4 days, 5 days, 6 days, 7 days, 10 days, 12 days, 15 days, 20 days, 28 days, 35 days, 50 days, 70 days, 100 days, 120 days, 150 days, 180 days, 200 days, 250 days, 280 days, 300 days, 320 days, 350 days, or 365 days. The dose reduction during a drug holiday is from 10%-100%, including, by way of example only, 10%, 15%, 20%, 25%, 30%, 35%, 40%, 45%, 50%, 55%, 60%, 65%, 70%, 75%, 80%, 85%, 90%, 95%, or 100%.

[0239] In an exemplary therapeutic regimen, an anti-Gal3 antibody or binding fragment thereof is administered in 1, 2, 3, 4, 5, 6, 7, 8, 9, or 10 unit doses. In some embodiments, 5, 6, 7, 8, 9, or 10 unit doses are administered. In some embodiments, 5 unit doses are administered. In some embodiments, 8 unit doses are administered. In some embodiments, each unit dose comprises 1000 mg or about 1000 mg of the anti-Gal3 antibody or binding fragment thereof, the unit doses are administered every 7 days or about 7 days, and where each unit dose is administered over the course of 1 hour or about 1 hour. In some embodiments, the anti-Gal3 antibody or binding fragment thereof is TB006 or binding fragment thereof. In some embodiments, the anti-Gal3 antibody or binding fragment thereof is administered enterally, orally, intranasally, parenterally, intracranially, subcutaneously. In some embodiments, the anti-Gal3 antibody or binding fragment thereof is administered intravenously.

[0240] In an exemplary therapeutic regimen, an anti-Gal3 antibody or binding fragment thereof is administered in 5 unit doses. In some embodiments, each unit dose comprises 50, 60, 70, 80, 90, 100, 200, 300, 400, 500, 600, 700, 800, 900, 1000, 1100, 1200, 1300, 1400, 1500, 1600, 1700, 1800, 1900, 2000, 2500, 3000, 3500, 4000, 4500 or 5000 mg of the anti-Gal3 antibody or binding fragment thereof per unit dose, or any amount per unit dose within a range defined by any two of the aforementioned amounts per unit dose. In some embodiments, each unit dose comprises 800, 900, 1000, 1100, 1200, 1300, 1400, or 1500 mg of the anti-Gal3 antibody or binding fragment thereof per unit dose, or any amount per unit dose within a range defined by any two of the aforementioned amounts per unit dose. In some embodiments, each unit dose comprises 1000 mg or about 1000 mg of the anti-Gal3 antibody or binding fragment thereof per unit dose. The unit doses are administered every 7 days or about 7 days, and where each unit dose is administered over the course of 1 hour or about 1 hour. In some embodiments, the anti-Gal3 antibody or binding fragment thereof is TB006 or binding fragment thereof. In some embodiments, the anti-Gal3 antibody or binding fragment thereof is administered enterally, orally, intranasally, parenterally, intracranially, subcutaneously. In some embodiments, the anti-Gal3 antibody or binding fragment thereof is administered intravenously.

[0241] In an exemplary therapeutic regimen, an anti-Gal3 antibody or binding fragment thereof is administered in 5 unit doses, where each unit dose comprises 1000 mg or about 1000 mg of the anti-Gal3 antibody or binding fragment thereof per unit dose. In some embodiments, the unit doses are administered every 1, 2, 3, 4, 5, 6, or 7 days, or 1, 2, 3, or 4 weeks, or any interval within a range defined by any two of the aforementioned intervals. In some embodiments, the unit doses are administered every 7 days or about 7 days. Each unit dose is administered over the course of 1 hour or about 1 hour. In some embodiments, the anti-Gal3 antibody or binding fragment thereof is TB006 or binding fragment thereof. In some embodiments, the anti-Gal3 antibody or binding fragment thereof is administered enterally, orally, intranasally, parenterally, intracranially, subcutaneously. In some embodiments, the anti-Gal3 antibody or binding fragment thereof is administered intravenously.

[0242] In an exemplary therapeutic regimen, an anti-Gal3 antibody or binding fragment thereof is administered in 5 unit doses, where each unit dose comprises 1000 mg or about 1000 mg of the anti-Gal3 antibody or binding fragment thereof per unit dose, and the unit doses are administered every 7 days or about 7 days. In some embodiments, each unit dose is administered over the course of 10, 20, 30, 40, 50, 60, 70, 80, 90, or 100 minutes, or any amount of time within a range defined by any two of the aforementioned durations. In some embodiments, each unit dose is administered over the course of 1 hour or about 1 hour. In some embodiments, the anti-Gal3 antibody or binding fragment thereof is TB006 or binding fragment thereof. In some embodiments, the anti-Gal3 antibody or binding fragment thereof is administered enterally, orally, intranasally, parenterally, intracranially, subcutaneously. In some embodiments, the anti-Gal3 antibody or binding fragment thereof is administered intravenously.

[0243] In an exemplary therapeutic regimen, an anti-Gal3 antibody or binding fragment thereof is administered in 5 unit doses, where each unit dose comprises 1000 mg or about 1000 mg of the anti-Gal3 antibody or binding fragment thereof, the unit doses are administered every 7 days or about 7 days, and where each unit dose is administered over the course of 1 hour or about 1 hour. In some embodiments, the anti-Gal3 antibody or binding fragment thereof is TB006 or binding fragment thereof. In some embodiments, the anti-Gal3 antibody or binding fragment thereof is administered enterally, orally, intranasally, parenterally, intracranially, subcutaneously. In some embodiments, the anti-Gal3 antibody or binding fragment thereof is administered intravenously.

[0244] In some embodiments, an anti-Gal3 antibody or binding fragment thereof, such as TB006, is supplied in 8 mL glass vials, sealed with a rubber stopper and an aluminum flip top, with strength of 160 mg (20 mg/mL, 8 mL) anti-Gal3 antibody or binding fragment per vial.

[0245] In some embodiments, the anti-Gal3 antibody or binding fragment thereof, such as TB006, is administered via IV infusion over 60 minutes, after dilution in 0.9% Sodium Chloride Injection, USP (normal saline) to a final volume of 250 mL.

[0246] Once improvement of the patient’s condition has occurred, a maintenance dose is administered if necessary. Subsequently, the dosage or the frequency of administration, or both, can be reduced, as a function of the symptoms, to a level at which the treated disease, disorder, or condition is retained.

[0247] In some embodiments, any one of the appropriate regimens provided herein are performed to comprise administering the subject 5 unit doses of 1000 mg or about 1000 mg of the anti-Gal3 antibody or binding fragment thereof, such as TB006, every 7 days or about 7 days, and assessing the subject by the NIHSS at Baseline (day 1 at the initial administration) and further assessed at Days 15, 36, 64, and 104 following the initial intervention.

[0248] In some embodiments, the amount of a given agent that correspond to such an amount varies depending upon factors such as the particular compound, the severity of the disease, the identity (e.g., weight) of the subject or host in need of treatment, but nevertheless is routinely determined in a manner known in the art according to the particular circumstances surrounding the case, including, e.g., the specific agent being administered, the route of administration, and the subject or host being treated. In some instances, the desired dose is conveniently presented in a single dose or as divided doses administered simultaneously (or over a short period of time) or at appropriate intervals, for example as two, three, four or more sub-doses per day.

[0249] The foregoing ranges are merely suggestive, as the number of variables in regard to an individual treatment regime is large, and considerable excursions from these recommended values are not uncommon. Such dosages are altered depending on a number of variables, not limited to the activity of the compound used, the disease or condition to be treated, the mode of administration, the requirements of the individual subject, the severity of the disease or condition being treated, and the judgment of the practitioner.

[0250] In some embodiments, toxicity and therapeutic efficacy of such therapeutic regimens are determined by standard pharmaceutical procedures in cell cultures or experimental animals, including, but not limited to, the determination of the LD50 (the dose lethal to 50% of the population) and the ED50 (the dose therapeutically effective in 50% of the population). The dose ratio between the toxic and therapeutic effects is the therapeutic index and it is expressed as the ratio between LD50 and ED50. Compounds exhibiting high therapeutic indices are preferred. The data obtained from cell culture assays and animal studies are used in formulating a range of dosage for use in human. The dosage of such compounds lies preferably within a range of circulating concentrations that include the ED50 with minimal toxicity. The dosage varies within this range depending upon the dosage form employed and the route of administration utilized.

### Exemplary Anti-Gal3 Antibodies and Binding Fragments Thereof

[0251] Disclosed herein and as applicable to any of the methods or uses disclosed herein are anti-Gal3 antibodies or binding fragments thereof. In some embodiments, the anti-Gal3 antibody or binding fragment thereof binds to the N-terminal domain of Gal3, N-terminus of Gal3, or the tandem repeat domain (TRD) of Gal3. In some embodiments, the anti-Gal3 antibody or binding fragment thereof does not bind to the N-terminus of Gal3, the N-terminal domain of Gal3, or the TRD of Gal3. In some embodiments, the anti-Gal3 antibody or binding fragment thereof binds to the C-terminus of Gal3, the C-terminal domain of Gal3, or the CRD of Gal3. In some embodiments, the anti-Gal3 antibody or binding fragment thereof does not bind to the C-terminus of Gal3, the C-terminal domain of Gal3, or the CRD of Gal3. In some embodiments, any of the anti-Gal3 antibodies or binding fragments thereof or any arrangement of any of the anti-Gal3 antibodies or binding fragments provided herein may be substituted with an antigen binding molecule that binds to Gal3.

[0252] In some embodiments, antibodies or binding fragments thereof are provided. In some embodiments, the antibodies are anti-Gal3 antibodies or binding fragments thereof. In some embodiments, the anti-Gal3 antibodies or binding fragments thereof comprises a heavy chain variable region comprising a V_{H}-CDR1, a V_{H}-CDR2, and a V_{H}-CDR3. In some embodiments, the anti-Gal3 antibodies or binding fragments thereof comprise a light chain variable region comprising a V_{L}-CDR1, a V_{L}-CDR2, and a V_{L}-CDR3. In some embodiments, the V_{H}-CDR1 comprises an amino acid sequence having at least 60%, 61%, 62%, 63%, 64%, 65%, 66%, 67%, 68%, 69%, 70%, 71%, 72%, 73%, 74%, 75%, 76%, 77%, 78%, 79%, 80%, 81%, 82%, 83%, 84%, 85%, 86%, 87%, 88%, 89%, 90%, 91%, 92%, 93%, 94%, 95%, 96%, 97%, 98%, 99%, or 100% sequence identity or similarity to any amino acid sequence according to SEQ ID NOs: 27-70. In some embodiments, the V_{H}-CDR2 comprises an amino acid sequence having at least 60%, 61%, 62%, 63%, 64%, 65%, 66%, 67%, 68%, 69%, 70%, 71%, 72%, 73%, 74%, 75%, 76%, 77%, 78%, 79%, 80%, 81%, 82%, 83%, 84%, 85%, 86%, 87%, 88%, 89%, 90%, 91%, 92%, 93%, 94%, 95%, 96%, 97%, 98%, 99%, or 100% sequence identity or similarity to any amino acid sequence according to SEQ ID NOs: 71-111, 801. In some embodiments, the V_{H}-CDR3 comprises an amino acid sequence having at least 60%, 61%, 62%, 63%, 64%, 65%, 66%, 67%, 68%, 69%, 70%, 71%, 72%, 73%, 74%, 75%, 76%, 77%, 78%, 79%, 80%, 81%, 82%, 83%, 84%, 85%, 86%, 87%, 88%, 89%, 90%, 91%, 92%, 93%, 94%, 95%, 96%, 97%, 98%, 99%, or 100% sequence identity or similarity to any amino acid sequence according to SEQ ID NOs: 112-169, 802. In some embodiments, the V_{L}-CDR1 comprises an amino acid sequence having at least 60%, 61%, 62%, 63%, 64%, 65%, 66%, 67%, 68%, 69%, 70%, 71%, 72%, 73%, 74%, 75%, 76%, 77%, 78%, 79%, 80%, 81%, 82%, 83%, 84%, 85%, 86%, 87%, 88%, 89%, 90%, 91%, 92%, 93%, 94%, 95%, 96%, 97%, 98%, 99%, or 100% sequence identity or similarity to any amino acid sequence according to SEQ ID NOs: 170-220. In some embodiments, the V_{L}-CDR2 comprises an amino acid sequence having at least 60%, 61%, 62%, 63%, 64%, 65%, 66%, 67%, 68%, 69%, 70%, 71%, 72%, 73%, 74%, 75%, 76%, 77%, 78%, 79%, 80%, 81%, 82%, 83%, 84%, 85%, 86%, 87%, 88%, 89%, 90%, 91%, 92%, 93%, 94%, 95%, 96%, 97%, 98%, 99%, or 100% sequence identity or similarity to any amino acid sequence according to SEQ ID NOs: 221-247. In some embodiments, the V_{L}-CDR3 comprises an amino acid sequence having at least 60%, 61%, 62%, 63%, 64%, 65%, 66%, 67%, 68%, 69%, 70%, 71%, 72%, 73%, 74%, 75%, 76%, 77%, 78%, 79%, 80%, 81%, 82%, 83%, 84%, 85%, 86%, 87%, 88%, 89%, 90%, 91%, 92%, 93%, 94%, 95%, 96%, 97%, 98%, 99%, or 100% sequence identity or similarity to any amino acid sequence according to SEQ ID NOs: 248-296. In some embodiments, the antibodies comprise one or more sequences having at least 80%, 81%, 82%, 83%, 84%, 85%, 86%, 87%, 88%, 89%, 90%, 91%, 92%, 93%, 94%, 95%, 96%, 97%, 98%, 99%, or 100% identity or similarity to a VL sequence, a VH sequence, a VL/VH pairing, and/or V_{H}-CDR1, V_{H}-CDR2, V_{H}-CDR3, V_{L}-CDR1, V_{L}-CDR2, V_{L}-CDR3 (including 1, 2, 3, 4, or 5 amino acid substitutions of any one or more of these CDRs) set from the heavy chain and light chain sequences as depicted in FIG. 9.

[0253] In some embodiments, antibodies or binding fragments thereof are provided. In some embodiments, the antibodies or binding fragments thereof are anti-Gal3 antibodies or binding fragments thereof. In some embodiments, the anti-Gal3 antibodies or binding fragments thereof comprises a heavy chain variable region comprising a V_{H}-CDR1, a V_{H}-CDR2, and a V_{H}-CDR3. In some embodiments, the anti-Gal3 antibodies or binding fragments thereof comprise a light chain variable region comprising a V_{L}-CDR1, a V_{L}-CDR2, and a V_{L}-CDR3. In some embodiments, the V_{H}-CDR1 comprises an amino acid sequence having at least 0, 1, 2, 3, 4, 5, or 6 substitutions relative to any amino acid sequence according to SEQ ID NOs: 27-70. In some embodiments, the V_{H}-CDR2 comprises an amino acid sequence having at least 0, 1, 2, 3, 4, 5, or 6 substitutions relative to any amino acid sequence according to SEQ ID NOs: 71-111, 801. In some embodiments, the V_{H}-CDR3 comprises an amino acid sequence having at least 0, 1, 2, 3, 4, 5, or 6 substitutions relative to any amino acid sequence according to SEQ ID NOs: 112-169, 802. In some embodiments, the V_{L}-CDR1 comprises an amino acid sequence having at least 0, 1, 2, 3, 4, 5, or 6 substitutions relative to any amino acid sequence according to SEQ ID NOs: 170-220. In some embodiments, the V_{L}-CDR2 comprises an amino acid sequence having at least 0, 1, 2, 3, 4, 5, or 6 substitutions relative to any amino acid sequence according to SEQ ID NOs: 221-247. In some embodiments, the V_{L}-CDR3 comprises an amino acid sequence having at least 0, 1, 2, 3, 4, 5, or 6 substitutions relative to any amino acid sequence according to SEQ ID NOs: 248-296.

[0254] In some embodiments, the antibody or binding fragment thereof comprises a combination of a V_{L}-CDR1, a V_{L}-CDR2, a V_{L}-CDR3, a V_{H}-CDR1, a V_{H}-CDR2, and a V_{H}-CDR3 as illustrated in FIG. 7.

[0255] In some embodiments, the antibody or binding fragment thereof comprises a combination of a V_{H}-CDR1, a V_{H}-CDR2, a V_{H}-CDR3, V_{L}-CDR1, a V_{L}-CDR2, and a V_{L}-CDR3, where one or more of these CDRs is defined by a consensus sequence. The consensus sequences provided herein have been derived from the alignments of CDRs depicted in FIGS. 18A-B. However, it is envisioned that alternative alignments may be done (e.g. using global or local alignment, or with different algorithms, such as Hidden Markov Models, seeded guide trees, Needleman-Wunsch algorithm, or Smith-Waterman algorithm) and as such, alternative consensus sequences can be derived.

[0256] In some embodiments, the V_{H}-CDR1 is defined by the formula X₁X₂X₃X₄X_{S}X₆X₇X_{S}X₉X₁₀, (SEQ ID No. 935) where X₁ is E, G, or R; X₂ is F, N, or Y; X₃ is A, I, K, N, S, or T; X₄ is F, I, or L; X₅ is I, K, N, R, S, or T; X₆ is D, G, I, N, S, or T; X₇ is F, G, H, S, or Y; X₈ is no amino acid, A, D, G, I, M, N, T, V, W, or Y; X₉ is no amino acid, M, or Y; X₁₀ is no amino acid or G; In some embodiments, the V_{H}-CDR1 comprises a sequence having at least 80%, 81%, 82%, 83%, 84%, 85%, 86%, 87%, 88%, 89%, 90%, 91%, 92%, 93%, 94%, 95%, 96%, 97%, 98%, 99%, or 100% identity to this consensus sequence. In some embodiments, the V_{H}-CDR1 comprises a sequence having 0, 1, 2, 3, 4, 5, or 6 substitutions from this consensus sequence (SEQ ID No. 935).

[0257] In some embodiments, the V_{H}-CDR2 is defined by the formula X₁X₂X₃X₄X₅X₆X₇X₈X₉X₁₀, (SEQ ID No. 936) where X₁ is no amino acid, I, or L; X₂ is no amino acid or R; X₃ is no amino acid, F, I, L, or V; X₄ is A, D, F, H, K, L, N, S, W, or Y; X₅ is A, D, P, S, T, W, or Y; X₆ is D, E, G, H, K, N, S, V, or Y; X₇ is D, E, G, N, S, or T; X₈ is D, G, I, K, N, Q, R, S, V, or Y; X₉ is A, D, E, G, I, K, N, P, S, T, V, or Y; X₁₀ is no amino acid, I, P, S, or T. In some embodiments, the V_{H}-CDR2 comprises a sequence having at least 80%, 81%, 82%, 83%, 84%, 85%, 86%, 87%, 88%, 89%, 90%, 91%, 92%, 93%, 94%, 95%, 96%, 97%, 98%, 99%, or 100% identity to this consensus sequence. In some embodiments, the V_{H}-CDR2 comprises a sequence having 0, 1, 2, 3, 4, 5, or 6 substitutions from this consensus sequence (SEQ ID No. 936).

[0258] In some embodiments, the V_{H}-CDR3 is defined by the formula X₁X₂X₃X₄X_{S}X₆X₇X₈X₉X₁₀X₁₁X₁₂X₁₃X₁₄X₁₅X₁₆X₁₇X₁₈X₁₉X₂₀X₂₁X₂₂X₂₃X₂₄X₂₅ (SEQ ID No. 937), where X₁ is no amino acid or A; X₂ is no amino acid, A, R, or Y; X₃ is no amino acid, A, F, H, K, L, R, S, or V; X₄ is no amino acid, A, D, K, N, R, S, or T; X₅ is no amino acid, A, D, G, H, I, L, N, P, R, S, T, V, or Y; X₆ is no amino acid, A, D, G, H, K, N, P, Q, R, S, or Y; X₇ is no amino acid, D, F, G, H, P, R, S, W, or Y; X₈ is no amino acid, A, D, E, G, I, R, or S; X₉ is no amino acid, A, C, D, E, F, G, I, N, R, S, T, V, or Y; X₁₀ is no amino acid, A, D, M, P, R, S, T, V, or Y; X₁₁ is no amino acid, A, D, E, F, L, T, V, or Y; X₁₂ is no amino acid, A, G, L, M, R, or T; X₁₃ is no amino acid, A, D, E, F, G, R, S, T, or V; X₁₄ is no amino acid, A, D, G, L, P, Q, R, S, T, V, or Y; X₁₅ is no amino acid, A, D, G, N, S, V, W, or Y; X₁₆ is no amino acid, A, D, E, F, L, P, T, V, W, or Y; X₁₇ is no amino acid, F, I, L, M, R, or Y; X₁₈ is no amino acid, A, D, G, N, or T; X₁₉ is no amino acid, F, N, S, T, V, or Y; X₂₀ is no amino acid or L; X₂₁ is no amino acid or A; X₂₂ is no amino acid or W; X₂₃ is no amino acid or F; X₂₄ is no amino acid or A; X₂₅ is no amino acid or Y. In some embodiments, the V_{H}-CDR3 comprises a sequence having at least 80%, 81%, 82%, 83%, 84%, 85%, 86%, 87%, 88%, 89%, 90%, 91%, 92%, 93%, 94%, 95%, 96%, 97%, 98%, 99%, or 100% identity to this consensus sequence. In some embodiments, the V_{H}-CDR3 comprises a sequence having 0, 1, 2, 3, 4, 5, or 6 substitutions from this consensus sequence (SEQ ID No. 937).

[0259] In some embodiments, the V_{L}-CDR1 is defined by the formula X₁X₂X₃X₄X₅X₇X₇X₈X₉X₁₀X₁₁X₁₂X₁₃X₁₄X₁₅X₁₆X₁₇ (SEQ ID No. 938), where X₁ is no amino acid or R; X₂ is no amino acid or S; X₃ is no amino acid, S, or T; X₄ is no amino acid, E, G, K, Q, or R; X₅ is no amino acid, A, D, G, I, N, or S; X₆ is no amino acid, I, L, or V; X₇ is no amino acid, F, L, S, or V; X₈ is no amino acid, D, E, H, N, S, T, or Y; X₉ is no amino acid, D, E, I, K, N, R, S, T, or V; X₁₀ is no amino acid, D, H, N, R, S, or Y; X₁₁ is no amino acid, A, G, N, S, T, or V; X₁₂ is no amino acid, A, I, K, N, Q, T, V, or Y; X₁₃ is no amino acid, D, G, H, K, N, S, T, or Y; X₁₄ is no amino acid, C, F, I, N, S, T, V, or Y; X₁₅ is no amino acid, D, L, N, W, or Y; X₁₆ is no amino acid, N, or D; X₁₇ is no amino acid or D. In some embodiments, the V_{L}-CDR1 comprises a sequence having at least 80%, 81%, 82%, 83%, 84%, 85%, 86%, 87%, 88%, 89%, 90%, 91%, 92%, 93%, 94%, 95%, 96%, 97%, 98%, 99%, or 100% identity to this consensus sequence (SEQ ID No. 938). In some embodiments, the V_{L}-CDR1 comprises a sequence having 0, 1, 2, 3, 4, 5, or 6 substitutions from this consensus sequence.

[0260] In some embodiments, the V_{L}-CDR2 is defined by the formula X₁X₂X₃X₄X₅X₆X₇X₈ (SEQ ID No. 939), where X₁ is no amino acid, K, L, N, Q, or R; X₂ is no amino acid, A, L, M, or V; X₃ is no amino acid, C, K, or S; X₄ is no amino acid or T; X₅ is no amino acid, A, E, F, G, H, K, Q, R, S, W, or Y; X₆ is no amino acid, A, G, or T; X₇ is no amino acid, I, K, N, S, or T; X₈ is no amino acid, N, or S. In some embodiments, the V_{L}-CDR2 comprises a sequence having at least 80%, 81%, 82%, 83%, 84%, 85%, 86%, 87%, 88%, 89%, 90%, 91%, 92%, 93%, 94%, 95%, 96%, 97%, 98%, 99%, or 100% identity to this consensus sequence. In some embodiments, the V_{L}-CDR2 comprises a sequence having 0, 1, 2, 3, 4, 5, or 6 substitutions from this consensus sequence (SEQ ID No. 939).

[0261] In some embodiments, the V_{L}-CDR3 is defined by the formula X₁X₂X₃X₄X₅X₆X₇X_{S}X₉X₁₀ (SEQ ID No. 940), where X₁ is no amino acid, A, E, F, H, L, M, Q, S, V, or W; X₂ is A, H, or Q; X₃ is D, F, G, H, L, M, N, Q, S, T, W, or Y; X₄ is no amino acid or W; X₅ is A, D, I, K, L, N, Q, R, S, T, V, or Y; X₆ is D, E, H, I, K, L, N, Q, S, or T; X₇ is D, F, K, L, N, P, S, T, V, W, or Y; X₈ is H, P, or S; X₉ is F, L, P, Q, R, T, W, or Y; X₁₀ is no amino acid, T, or V. In some embodiments, the V_{L}-CDR3 comprises a sequence having at least 80%, 81%, 82%, 83%, 84%, 85%, 86%, 87%, 88%, 89%, 90%, 91%, 92%, 93%, 94%, 95%, 96%, 97%, 98%, 99%, or 100% identity to this consensus sequence. In some embodiments, the V_{L}-CDR3 comprises a sequence having 0, 1, 2, 3, 4, 5, or 6 substitutions from this consensus sequence (SEQ ID No. 940).

[0262] In some embodiments, the heavy chain variable region of the anti-Gal3 antibody or binding fragment thereof comprises a sequence having at least 80%, 81%, 82%, 83%, 84%, 85%, 86%, 87%, 88%, 89%, 90%, 91%, 92%, 93%, 94%, 95%, 96%, 97%, 98%, 99%, or 100% identity or similarity to the sequence selected from SEQ ID NOs: 297-373, 803, 806-820, 926. In some embodiments, the light chain variable region of the antibody or binding fragment thereof comprises a sequence having at least 80%, 81%, 82%, 83%, 84%, 85%, 86%, 87%, 88%, 89%, 90%, 91%, 92%, 93%, 94%, 95%, 96%, 97%, 98%, 99%, or 100% identity or similarity to the sequence selected from SEQ ID NOs: 374-447, 821-835, 927-929. In some embodiments, the antibodies or binding fragments thereof are anti-Gal3 antibodies or binding fragments thereof.

[0263] In some embodiments, the antibodies comprise one or more sequences having at least 80%, 81%, 82%, 83%, 84%, 85%, 86%, 87%, 88%, 89%, 90%, 91%, 92%, 93%, 94%, 95%, 96%, 97%, 98%, 99%, or 100% identity or similarity to a VL sequence, a VH sequence, a VL/VH pairing, and/or V_{L}-CDR1, V_{L}-CDR2, V_{L}-CDR3, V_{H}-CDR1, V_{H}-CDR2, V_{H}-CDR3 (including 1, 2, 3, 4, or 5 amino acid substitutions of any one or more of these CDRs) set from the heavy chain and light chain sequences as depicted in FIG. 9.

[0264] In some embodiments, antibodies or binding fragments thereof are provided. In some embodiments, the antibodies are anti-Gal3 antibodies or binding fragments thereof. In some embodiments, the anti-Gal3 antibodies or binding fragments thereof comprises a heavy chain variable region comprising a V_{H}-CDR1, a V_{H}-CDR2, and a V_{H}-CDR3. In some embodiments, the anti-Gal3 antibodies or binding fragments thereof comprise a light chain variable region comprising a V_{L}-CDR1, a V_{L}-CDR2, and a V_{L}-CDR3. In some embodiments, the V_{H}-CDR1 comprises one of the amino acid sequences of SEQ ID NOs: 27-70, the V_{H}-CDR2 comprises one of the amino acid sequences of SEQ ID NOs: 71-111, 801, the V_{H}-CDR3 comprises one of the amino acid sequences of SEQ ID NO: 112-169, 802, the V_{L}-CDR1 comprises one of the amino acid sequences of SEQ ID NOs: 170-220, the V_{L}-CDR2 comprises one of the amino acid sequences of SEQ ID NOs: 211-247, the V_{L}-CDR3 comprises one of the amino acid sequences of SEQ ID NOs: 248-296, the heavy chain variable region has a sequence having at least 80%, 81%, 82%, 83%, 84%, 85%, 86%, 87%, 88%, 89%, 90%, 91%, 92%, 93%, 94%, 95%, 96%, 97%, 98%, 99%, or 100% identity to one of the amino acid sequences of SEQ ID NOs: 297-373, 803, 806-820, 926, and the light chain variable region has a sequence having at least 80%, 81%, 82%, 83%, 84%, 85%, 86%, 87%, 88%, 89%, 90%, 91%, 92%, 93%, 94%, 95%, 96%, 97%, 98%, 99%, or 100% identity to one of the amino acid sequences of SEQ ID NOs: 374-447, 821-835, 927-929.

[0265] In some embodiments, the anti-Gal3 antibody or binding fragment thereof comprises a heavy chain, wherein the heavy chain comprises a sequence having at least 80%, 81%, 82%, 83%, 84%, 85%, 86%, 87%, 88%, 89%, 90%, 91%, 92%, 93%, 94%, 95%, 96%, 97%, 98%, 99%, or 100% identity or similarity to the sequence selected from SEQ ID NOs: 448-494, 804, 836-850. In some embodiments, the antibody or binding fragment thereof comprises a light chain, wherein the light chain comprises a sequence having at least 80%, 81%, 82%, 83%, 84%, 85%, 86%, 87%, 88%, 89%, 90%, 91%, 92%, 93%, 94%, 95%, 96%, 97%, 98%, or 99% identity or similarity to the sequence selected from SEQ ID NOs: 495-538, 805, 851-865. In some embodiments, the antibodies or binding fragments thereof are anti-Gal3 antibodies or binding fragments thereof.

[0266] In some embodiments, antibodies or binding fragments thereof are provided. In some embodiments, the antibodies are anti-Gal3 antibodies or binding fragments thereof. In some embodiments, the anti-Gal3 antibodies or binding fragments thereof comprise a heavy chain variable region and a light chain variable region. In some embodiments, the heavy chain variable region is paired with an IgG4 heavy chain constant domain or an IgG2 heavy chain constant domain. In some embodiments, the IgG4 heavy chain constant domain or IgG2 heavy chain constant domain are human or murine. In some embodiments, the IgG4 heavy chain constant domain comprises a sequence having at least 80%, 81%, 82%, 83%, 84%, 85%, 86%, 87%, 88%, 89%, 90%, 91%, 92%, 93%, 94%, 95%, 96%, 97%, 98%, 99%, or 100% identity to SEQ ID NO: 931. In some embodiments, the IgG4 heavy chain constant domain is an S228P mutant. In some embodiments, the IgG2 heavy chain constant domain comprises a sequence having at least 80%, 81%, 82%, 83%, 84%, 85%, 86%, 87%, 88%, 89%, 90%, 91%, 92%, 93%, 94%, 95%, 96%, 97%, 98%, 99%, or 100% identity to SEQ ID NO: 933 or SEQ ID NO: 934. In some embodiments, the IgG2 heavy chain constant domain is a LALAPG or a LALA mutant. In some embodiments, the light chain variable region is paired with an IgG4 kappa chain constant domain. In some embodiments, the IgG4 kappa chain constant domain comprises a sequence having at least 80%, 81%, 82%, 83%, 84%, 85%, 86%, 87%, 88%, 89%, 90%, 91%, 92%, 93%, 94%, 95%, 96%, 97%, 98%, 99%, or 100% identity to SEQ ID NO: 932. In some embodiments, the light chain variable region and/or heavy chain variable region may be selected from those depicted in FIGS. 5 and 6 and/or the combinations of light chain variable region and heavy chain variable region as depicted in FIG. 8. In some embodiments, the light chain variable region and/or heavy chain variable regions comprise one or more CDRs depicted in FIGS. 3A-C, 4A-C and/or the combinations of CDRs depicted in FIG. 7.

[0267] In some embodiments, the antibody or binding fragment thereof is selected from the group consisting of: TB001, TB006, 12G5.D7, 13A12.2E5, 14H10.2C9, 15F10.2D6, 19B5.2E6, 20D11.2C6, 20H5.A3, 23H9.2E4, 2D10.2B2, 3B11.2G2, 7D8.2D8, mIMT001, 4A11.2B5, 4A11.H1L1, 4A11.H4L2, 4G2.2G6, 6B3.2D3, 6H6.2D6, 9H2.2H10, 13G4.2F8, 13H12.2F8, 15G7.2A7, 19D9.2E5, 23B10.2B12, 24D12.2H9, F846C.1B2, F846C.1F5, F846C.1H12, F846C.1H5, F846C.2H3, F846TC.14A2, F846TC.14E4, F846TC.16B5, F846TC.7F10, F847C.10B9, F847C.11B1, F847C.12F12, F847C.26F5, F847C.4B10, F849C.8D10, F849C.8H3, 846.2B11, 846.4D5, 846T.1H2, 847.14H4, 846.2D4, 846.2F11, 846T.10B1, 846T.2E3, 846T.4C9, 846T.4E11, 846T.4F5, 846T.8D1, 847.10C9, 847.11D6, 847.15D12, 847.15F9, 847.15H11, 847.20H7, 847.21B11, 847.27B9, 847.28D1, 847.2B8, 847.3B3, 849.1D2, 849.2D7, 849.2F12, 849.4B2, 849.4F12, 849.4F2, 849.5C2, 849.8D12, F847C.21H6, 849.5H1, 847.23F11, 847.16D10, 847.13E2-mH0mL1, 847.13E2-mH0mL2, 847.12C4, 847.4D3, 2D10-VH0-VL0, 2D10-hVH4-HVL1, 2D10-hVH4-HVL2, 2D10-hVH4-HVL3, 2D10-hVH4-HVL4, 2D10-hVH3-HVL1, 2D10-hVH3-HVL2, 2D10-hVH3-HVL3, 2D10-hVH3-HVL4, 20H5.A3-VH3VL1, 20H5.A3-VH3VL3, 20H5.A3-VH4VL1, 20H5.A3-VH5VL1, 20H5.A3-VH5VL3, 20H5.A3-VH6VL1, 20H5.A3-VH6VL3, or binding fragment thereof.

[0268] In some embodiments, the antibody or binding fragment thereof comprises a sequence (e.g. CDR, VL, VH, LC, HC) having at least 80%, 81%, 82%, 83%, 84%, 85%, 86%, 87%, 88%, 89%, 90%, 91%, 92%, 93%, 94%, 95%, 96%, 97%, 98%, 99%, or 100% sequence identity or similarity to a sequence of TB001, TB006, 12G5.D7, 13A12.2E5, 14H10.2C9, 15F10.2D6, 19B5.2E6, 20D11.2C6, 20H5.A3, 23H9.2E4, 2D10.2B2, 3B11.2G2, 7D8.2D8, mIMT001, 4A11.2B5, 4A11.H1L1, 4A11.H4L2, 4G2.2G6, 6B3.2D3, 6H6.2D6, 9H2.2H10, 13G4.2F8, 13H12.2F8, 15G7.2A7, 19D9.2E5, 23B10.2B12, 24D12.2H9, F846C.1B2, F846C.1F5, F846C.1H12, F846C.1H5, F846C.2H3, F846TC.14A2, F846TC.14E4, F846TC.16B5, F846TC.7F10, F847C.10B9, F847C.11B1, F847C.12F12, F847C.26F5, F847C.4B10, F849C.8D10, F849C.8H3, 846.2B11, 846.4D5, 846T.1H2, 847.14H4, 846.2D4, 846.2F11, 846T.10B1, 846T.2E3, 846T.4C9, 846T.4E11, 846T.4F5, 846T.8D1, 847.10C9, 847.11D6, 847.15D12, 847.15F9, 847.15H11, 847.20H7, 847.21B11, 847.27B9, 847.28D1, 847.2B8, 847.3B3, 849.1D2, 849.2D7, 849.2F12, 849.4B2, 849.4F12, 849.4F2, 849.5C2, 849.8D12, F847C.21H6, 849.5H1, 847.23F11, 847.16D10, 847.13E2-mH0mL1, 847.13E2-mH0mL2, 847.12C4, 847.4D3, 2D10-VH0-VL0, 2D10-hVH4-HVL1, 2D10-hVH4-HVL2, 2D10-hVH4-HVL3, 2D10-hVH4-HVL4, 2D10-hVH3-HVL1, 2D10-hVH3-HVL2, 2D10-hVH3-HVL3, 2D10-hVH3-HVL4, 20H5.A3-VH3VL1, 20H5.A3-VH3VL3, 20H5.A3-VH4VL1, 20H5.A3-VH5VL1, 20H5.A3-VH5VL3, 20H5.A3-VH6VL1, 20H5.A3-VH6VL3, or binding fragment thereof.

[0269] In some embodiments, the anti-Gal3 antibody or binding fragment thereof excludes the subset of named anti-Gal3 antibodies or binding fragments thereof depicted in any one of FIGS. 19A-D. In some embodiments, CDRs (including heavy chain and light chain CDRs), heavy chain variable regions, light chain variable regions, heavy chains, and/or light chains are excluded from the sequences associated with the subset of named anti-Gal3 antibodies or binding fragments thereof depicted in any one of FIGS. 19A-D. In some embodiments, combinations of CDRs (including heavy chain and light chain CDRs), heavy chain variable regions, light chain variable regions, heavy chains, and/or light chains are excluded from the sequences associated with the subset of named anti-Gal3 antibodies or binding fragments thereof depicted in any one of FIGS. 19A-D. In some embodiments, the anti-Gal3 antibody or binding fragment thereof excludes those selected from the group of named anti-Gal3 antibody or binding fragment thereof depicted in FIG. 19A, or excludes any one or more of the CDRs, VH, VL, HC, and/or LC thereof. In some embodiments, the anti-Gal3 antibody or binding fragment thereof excludes those selected from the group of named anti-Gal3 antibody or binding fragment thereof depicted in FIG. 19B, or excludes any one or more of the CDRs, VH, VL, HC, and/or LC thereof. In some embodiments, the anti-Gal3 antibody or binding fragment thereof excludes those selected from the group of named anti-Gal3 antibody or binding fragment thereof depicted in FIG. 19C, or excludes any one or more of the CDRs, VH, VL, HC, and/or LC thereof. In some embodiments, the anti-Gal3 antibody or binding fragment thereof excludes those selected from the group of named anti-Gal3 antibody or binding fragment thereof depicted in FIG. 19D, or excludes any one or more of the CDRs, VH, VL, HC, and/or LC thereof. In some embodiments, the anti-Gal3 antibody or binding fragment thereof excludes those selected from the group of named anti-Gal3 antibody or binding fragment thereof depicted in FIG. 19A, or excludes any one or more of the CDRs, VH, VL, HC, and/or LC thereof. In some embodiments, the anti-Gal3 antibody or binding fragment thereof excludes those selected from the group of named anti-Gal3 antibody or binding fragment thereof depicted in FIG. 19B, or excludes any one or more of the CDRs, VH, VL, HC, and/or LC thereof. In some embodiments, the anti-Gal3 antibody or binding fragment thereof excludes those selected from the group of named anti-Gal3 antibody or binding fragment thereof depicted in FIG. 19C, or excludes any one or more of the CDRs, VH, VL, HC, and/or LC thereof. In some embodiments, the anti-Gal3 antibody or binding fragment thereof excludes those selected from the group of named anti-Gal3 antibody or binding fragment thereof depicted in FIG. 19D, or excludes any one or more of the CDRs, VH, VL, HC, and/or LC thereof. In other embodiments, any of these constructs are used for any of the methods provided herein.

[0270] In some embodiments, the anti-Gal3 antibody or binding fragment thereof is selected from the subset of named anti-Gal3 antibodies or binding fragments thereof depicted in any one of FIGS. 20A-D. In some embodiments, CDRs (including heavy chain and light chain CDRs), heavy chain variable regions, light chain variable regions, heavy chains, and/or light chains are selected from the sequences associated with the subset of named anti-Gal3 antibodies or binding fragments thereof depicted in any one of FIGS. 20A-D. In some embodiments, combinations of CDRs (including heavy chain and light chain CDRs), heavy chain variable regions, light chain variable regions, heavy chains, and/or light chains are selected from the sequences associated with the subset of named anti-Gal3 antibodies or binding fragments thereof depicted in any one of FIGS. 20A-D. In some embodiments, the anti-Gal3 antibody or binding fragment thereof is selected from the group of named anti-Gal3 antibody or binding fragment thereof depicted in FIG. 20A, or comprises any one or more of the CDRs, VH, VL, HC, and/or LC thereof. In some embodiments, the anti-Gal3 antibody or binding fragment thereof is selected from the group of named anti-Gal3 antibody or binding fragment thereof depicted in FIG. 20B, or comprises any one or more of the CDRs, VH, VL, HC, and/or LC thereof. In some embodiments, the anti-Gal3 antibody or binding fragment thereof is selected from the group of named anti-Gal3 antibody or binding fragment thereof depicted in FIG. 20C, or comprises any one or more of the CDRs, VH, VL, HC, and/or LC thereof. In some embodiments, the anti-Gal3 antibody or binding fragment thereof is selected from the group of named anti-Gal3 antibody or binding fragment thereof depicted in FIG. 20D, or comprises any one or more of the CDRs, VH, VL, HC, and/or LC thereof.

[0271] In some embodiments, the anti-Gal3 antibody or binding fragment thereof binds to specific epitopes within a Gal3 protein. In some embodiments, the anti-Gal3 antibody or binding fragment thereof binds to a specific epitope within a Gal3 protein having an amino acid sequence according to SEQ ID NO: 1-2, provided in FIG. 1.

[0272] In some embodiments, the anti-Gal3 antibody or binding fragment thereof may bind to at least 1, 2, 3, 4, 5, 6, 7, 8, 9, 10, 11, 12, 13, 14, 15, 16, 17, 18, 19, or 20 amino acid residues within a peptide illustrated in FIG. 2 (SEQ ID NOs: 3-26).

[0273] In some embodiments, the anti-Gal3 antibody or binding fragment thereof may bind to at least 1, 2, 3, 4, 5, 6, 7, 8, 9, 10, 11, 12, 13, 14, 15, 16, 17, 18, 19, or 20 amino acid residues within amino acid residues 1-20 of SEQ ID NO: 1-2. In some embodiments, the anti-Gal3 antibody or binding fragment thereof may bind to at least 1, 2, 3, 4, 5, 6, 7, 8, 9, 10, 11, 12, 13, 14, 15, 16, 17, 18, 19, or 20 amino acid residues within amino acid residues 31-50 of SEQ ID NO: 1-2. In some embodiments, the anti-Gal3 antibody or binding fragment thereof may bind to at least 1, 2, 3, 4, 5, 6, 7, 8, 9, 10, 11, 12, 13, 14, 15, 16, 17, 18, 19, or 20 amino acid residues within amino acid residues 51-70 of SEQ ID NO: 1-2. In some embodiments, the anti-Gal3 antibody or binding fragment thereof may bind to at least 1, 2, 3, 4, 5, 6, 7, 8, 9, 10, 11, 12, 13, 14, 15, 16, 17, 18, 19, or 20 amino acid residues within amino acid residues 61-80 of SEQ ID NO: 1-2.

[0274] In some embodiments, the anti-Gal3 antibody or binding fragment thereof may bind to at least 1, 2, 3, 4, 5, 6, 7, 8, 9, 10, 11, 12, 13, 14, 15, 16, 17, 18, 19, or 20 amino acid residues within Peptide 1 (SEQ ID NO: 3), Peptide 4 (SEQ ID NO: 6), Peptide 6 (SEQ ID NO: 8), or Peptide 7 (SEQ ID NO: 9). In some embodiments, the anti-Gal3 antibody or binding fragment thereof may bind to at least 1, 2, 3, 4, 5, 6, 7, 8, 9, 10, 11, 12, 13, 14, 15, 16, 17, 18, 19, or 20 amino acid residues within Peptide 1 (SEQ ID NO: 3). In some embodiments, the anti-Gal3 antibody or binding fragment thereof may bind to at least 11, 2, 3, 4, 5, 6, 7, 8, 9, 10, 11, 12, 13, 14, 15, 16, 17, 18, 19, or 20 amino acid residues within Peptide 4 (SEQ ID NO: 6). In some embodiments, the anti-Gal3 antibody or binding fragment thereof may bind to at least 1, 2, 3, 4, 5, 6, 7, 8, 9, 10, 11, 12, 13, 14, 15, 16, 17, 18, 19, or 20 amino acid residues within Peptide 6 (SEQ ID NO: 8). In some embodiments, the anti-Gal3 antibody or binding fragment thereof may bind to at least 1, 2, 3, 4, 5, 6, 7, 8, 9, 10, 11, 12, 13, 14, 15, 16, 17, 18, 19, or 20 amino acid residues within Peptide 7 (SEQ ID NO: 9). In some embodiments, the anti-Gal3 antibody or binding fragment thereof binds to an epitope present within a region of Gal3 defined by Peptide 1 (SEQ ID NO: 3). In some embodiments, the anti-Gal3 antibody or binding fragment thereof binds to an epitope present within a region of Gal3 defined by Peptide 4 (SEQ ID NO: 6). In some embodiments, the anti-Gal3 antibody or binding fragment thereof binds to an epitope present within a region of Gal3 defined by Peptide 6 (SEQ ID NO: 8). In some embodiments, the anti-Gal3 antibody or binding fragment thereof binds to an epitope present within a region of Gal3 defined by Peptide 7 (SEQ ID NO: 9). In some embodiments, the antibody is one that binds to 1, 2, or all 3 of peptides 1, 6, and/or 7.

[0275] In some embodiments, an anti-Gal3 antibody or binding fragment thereof as described herein may bind to the N-terminal domain of Gal3 or a portion thereof. In some embodiments, an anti-Gal3 antibody or binding fragment thereof as described herein may bind to an epitope of Gal3 that includes a motif of GxYPG, where x is the amino acids alanine (A), glycine (G), or valine (V). In some embodiments, an anti-Gal3 antibody or binding fragment thereof as described herein may bind to an epitope of Gal3 that includes two GxYPG motifs separated by three amino acids, where x is A, G, or V.

[0276] In some embodiments, the anti-Gal3 antibody or binding fragment thereof binds to Gal3. In some embodiments, the anti-Gal3 antibody or binding fragment thereof binds to the N-terminus of Gal3, the N-terminal domain of Gal3, or the TRD of Gal3. In some embodiments, the anti-Gal3 antibody or binding fragment thereof does not bind to the N-terminus of Gal3, the N-terminal domain of Gal3, or the TRD of Gal3. In some embodiments, the anti-Gal3 antibody or binding fragment thereof binds to the C-terminus of Gal3, the C-terminal domain of Gal3, or the CRD of Gal3. In some embodiments, the anti-Gal3 antibody or binding fragment thereof does not bind to the C-terminus of Gal3, the C-terminal domain of Gal3, or the CRD of Gal3. In some embodiments, the anti-Gal3 antibody or binding fragment thereof binds to Gal3 isoform 1. In some embodiments, the anti-Gal3 antibody or binding fragment thereof binds to the N-terminus of Gal3 isoform 1, the N-terminal domain of Gal3 isoform 1, amino acids 1-111 of Gal3 isoform 1, the TRD of Gal3 isoform 1, or amino acids 36-109 of Gal3 isoform 1. In some embodiments, the anti-Gal3 antibody or binding fragment thereof does not bind to the N-terminus of Gal3 isoform 1, the N-terminal domain of Gal3 isoform 1, amino acids 1-111 of Gal3, the TRD of Gal3 isoform 1, or amino acids 36-109 of Gal3 isoform 1. In some embodiments, the anti-Gal3 antibody or binding fragment thereof binds to the C-terminus of Gal3 isoform 1, the C-terminal domain of Gal3 isoform 1, amino acids 112-250 of Gal3, or the CRD of Gal3. In some embodiments, the anti-Gal3 antibody or binding fragment thereof does not bind to the C-terminus of Gal3 isoform 1, the C-terminal domain of Gal3 isoform 1, amino acids 112-250 of Gal3 isoform 1, or the CRD of Gal3. In some embodiments, the anti-Gal3 antibody or binding fragment thereof binds to the N-terminus of Gal3 isoform 3, the N-terminal domain of Gal3 isoform 3, amino acids 1-125 of Gal3, the TRD of Gal3 isoform 3, or amino acids 50-123 of Gal3 isoform 3. In some embodiments, the anti-Gal3 antibody or binding fragment thereof does not bind to the N-terminus of Gal3 isoform 3, the N-terminal domain of Gal3 isoform 3, amino acids 1-125 of Gal3 isoform 3, the TRD of Gal3, or amino acids 50-123 of Gal3 isoform 3. In some embodiments, the anti-Gal3 antibody or binding fragment thereof binds to the C-terminus of Gal3 isoform 3, the C-terminal domain of Gal3 isoform 3, amino acids 126-264 of Gal3 isoform 3, or the CRD of Gal3. In some embodiments, the anti-Gal3 antibody or binding fragment thereof does not bind to the C-terminus of Gal3 isoform 3, the C-terminal domain of Gal3 isoform 3, amino acids 126-264 of Gal3 isoform 3, or the CRD of Gal3 isoform 3.

[0277] In some embodiments, the anti-Gal3 antibody or binding fragment thereof reduces an interaction between Gal3 and a target protein to less than 80%, less than 75%, less than 70%, less than 60%, less than 59%, less than 50%, less than 40%, less than 34%, less than 30%, less than 20%, less than 14%, less than 10%, less than 7%, less than 5%, less than 4%, or less than 1%.

[0278] In some embodiments, the anti-Gal3 antibody or binding fragment thereof binds to Gal3 with a dissociation constant (K_{D}) of less than 1 nM, less than 1.2 nM, less than 2 nM, less than 5 nM, less than 10 nM, less than 13.5 nM, less than 15 nM, less than 20 nM, less than 25 nM, or less than 30 nM. In some embodiments, the anti-Gal3 antibody or binding fragment thereof binds to Gal3 with a K_{D} of less than 1 nM. In some embodiments, the anti-Gal3 antibody or binding fragment thereof binds to Gal3 with a K_{D} of less than 1.2 nM. In some embodiments, the anti-Gal3 antibody or binding fragment thereof binds to Gal3 with a K_{D} of less than 2 nM. In some embodiments, the anti-Gal3 antibody or binding fragment thereof binds to Gal3 with a K_{D} of less than 5 nM. In some embodiments, the anti-Gal3 antibody or binding fragment thereof binds to Gal3 with a K_{D} of less than 10 nM. In some embodiments, the anti-Gal3 antibody or binding fragment thereof binds to Gal3 with a K_{D} of less than 13.5 nM. In some embodiments, the anti-Gal3 antibody or binding fragment thereof binds to Gal3 with a K_{D} of less than 15 nM. In some embodiments, the anti-Gal3 antibody or binding fragment thereof binds to Gal3 with a K_{D} of less than 20 nM. In some embodiments, the anti-Gal3 antibody or binding fragment thereof binds to Gal3 with a K_{D} of less than 25 nM. In some embodiments, the anti-Gal3 antibody or binding fragment thereof binds to Gal3 with a K_{D} of less than 30 nM.

[0279] In some embodiments, the anti-Gal3 antibody or binding fragment thereof comprises any one of the variable heavy chain complementarity-determining region 1 (V_{H}-CDR1) sequences illustrated in FIG. 3A (SEQ ID NOs: 27-70). In some embodiments, the anti-Gal3 antibody comprises a V_{H}-CDR1 sequence having at least 60%, at least 65%, at least 70%, at least 75%, at least 80%, at least 85%, at least 86%, at least 87%, at least 88%, at least 89%, at least 90%, at least 91%, at least 92%, at least 93%, at least 94%, at least 95%, at least 96%, at least 97%, at least 98%, or at least 99% sequence identity or similarity to any one of SEQ ID NOs: 27-70.

[0280] In some embodiments, the anti-Gal3 antibody or binding fragment thereof comprises any one of the variable heavy chain complementarity-determining region 2 (V_{H}-CDR2) sequences illustrated in FIG. 3B (SEQ ID NOs: 71-111, 801). In some embodiments, the anti-Gal3 antibody or binding fragment thereof comprises a V_{H}-CDR2 sequence having at least 60%, at least 65%, at least 70%, at least 75%, at least 80%, at least 85%, at least 86%, at least 87%, at least 88%, at least 89%, at least 90%, at least 91%, at least 92%, at least 93%, at least 94%, at least 95%, at least 96%, at least 97%, at least 98%, or at least 99% sequence identity or similarity to any one of SEQ ID NOs: 71-111, 801.

[0281] In some embodiments, the anti-Gal3 antibody or binding fragment thereof comprises any one of the variable heavy chain complementarity-determining region 3 (V_{H}-CDR3) sequences illustrated in FIG. 3C (SEQ ID NOs: 112-169, 802). In some embodiments, the anti-Gal3 antibody or binding fragment thereof comprises a V_{H}-CDR3 sequence having at least 60%, at least 65%, at least 70%, at least 75%, at least 80%, at least 85%, at least 86%, at least 87%, at least 88%, at least 89%, at least 90%, at least 91%, at least 92%, at least 93%, at least 94%, at least 95%, at least 96%, at least 97%, at least 98%, or at least 99% sequence identity or similarity to any one of SEQ ID NOs: 112-169, 802.

[0282] In some embodiments, the anti-Gal3 antibody or binding fragment thereof comprises any one of the variable light chain complementarity-determining region 1 (V_{L}-CDR1) sequences illustrated in FIG. 4A (SEQ ID NOs: 170-220). In some embodiments, the anti-Gal3 antibody or binding fragment thereof comprises a V_{L}-CDR1 sequence having at least 60%, at least 65%, at least 70%, at least 75%, at least 80%, at least 85%, at least 86%, at least 87%, at least 88%, at least 89%, at least 90%, at least 91%, at least 92%, at least 93%, at least 94%, at least 95%, at least 96%, at least 97%, at least 98%, or at least 99% sequence identity or similarity to any one of SEQ ID NOs: 170-220.

[0283] In some embodiments, the anti-Gal3 antibody or binding fragment thereof comprises any one of the variable light chain complementarity-determining region 2 (V_{L}-CDR2) sequences illustrated in FIG. 4B (SEQ ID NOs: 221-247). In some embodiments, the anti-Gal3 antibody or binding fragment thereof comprises a V_{L}-CDR2 sequence having at least 60%, at least 65%, at least 70%, at least 75%, at least 80%, at least 85%, at least 86%, at least 87%, at least 88%, at least 89%, at least 90%, at least 91%, at least 92%, at least 93%, at least 94%, at least 95%, at least 96%, at least 97%, at least 98%, or at least 99% sequence identity or similarity to any one of SEQ ID NOs: 221-247.

[0284] In some embodiments, the anti-Gal3 antibody or binding fragment thereof comprises any one of the variable light chain complementarity-determining region 3 (V_{L}-CDR3) sequences illustrated in FIG. 4C (SEQ ID NOs: 248-296). In some embodiments, the anti-Gal3 antibody or binding fragment thereof comprises a V_{L}-CDR3 sequence having at least 60%, at least 65%, at least 70%, at least 75%, at least 80%, at least 85%, at least 86%, at least 87%, at least 88%, at least 89%, at least 90%, at least 91%, at least 92%, at least 93%, at least 94%, at least 95%, at least 96%, at least 97%, at least 98%, or at least 99% sequence identity or similarity to any one of SEQ ID NOs: 248-296.

[0285] In some embodiments, the anti-Gal3 antibody or binding fragment thereof comprises a heavy chain variable region (V_{H}) and a light chain variable region (V_{L}). In some embodiments, the V_{H} may comprise a V_{H}-CDR1, a V_{H}-CDR2, and/or a V_{H}-CDR3 selected from any of FIGS. 3A-C. In some embodiments, the V_{L} may comprise a V_{L}-CDR1, a V_{L}-CDR2, and/or a V_{L}-CDR3 selected from any of FIGS. 4A-C. In some embodiments, the anti-Gal3 antibody or binding fragment thereof comprises CDRs within the V_{H} and V_{L} sequences as illustrated in FIGS. 5 and 6.

[0286] In some embodiments, the anti-Gal3 antibody or binding fragment thereof comprises a heavy chain variable region (V_{H}) sequence selected from FIG. 5 (SEQ ID NOs: 297-373, 803, 806-820, 926). In some embodiments, the anti-Gal3 antibody or binding fragment thereof comprises a V_{H}- sequence having at least 60%, at least 65%, at least 70%, at least 75%, at least 80%, at least 85%, at least 86%, at least 87%, at least 88%, at least 89%, at least 90%, at least 91%, at least 92%, at least 93%, at least 94%, at least 95%, at least 96%, at least 97%, at least 98%, or at least 99% sequence identity or similarity to any one of SEQ ID NOs: 297-373, 803, 806-820, 926.

[0287] In some embodiments, the anti-Gal3 antibody or binding fragment thereof comprises a light chain variable region (V_{L}) sequence selected from FIG. 6 (SEQ ID NOs: 374-447, 821-835, 927-929). In some embodiments, the anti-Gal3 antibody or binding fragment thereof comprises a V_{L} sequence having at least 60%, at least 65%, at least 70%, at least 75%, at least 80%, at least 85%, at least 86%, at least 87%, at least 88%, at least 89%, at least 90%, at least 91%, at least 92%, at least 93%, at least 94%, at least 95%, at least 96%, at least 97%, at least 98%, or at least 99% sequence identity or similarity to any one of SEQ ID NOs: 374-447, 821-835, 927-929.

[0288] In some embodiments, the anti-Gal3 antibody or binding fragment thereof comprises a combination of heavy chain variable region and light chain variable region as illustrated in FIG. 8.

[0289] In some embodiments, the anti-Gal3 antibody or binding fragment thereof comprises heavy chain and light chain sequences as illustrated in FIG. 9 (SEQ ID NOs: 448-538, 804-805, 836-865.

[0290] In some embodiments, the anti-Gal3 antibody or binding fragment thereof is selected from the group of: TB001, TB006, 12G5.D7, 13A12.2E5, 14H10.2C9, 15F10.2D6, 19B5.2E6, 20D11.2C6, 20H5.A3, 23H9.2E4, 2D10.2B2, 3B11.2G2, 7D8.2D8, mIMT001, 4A11.2B5, 4A11.H1L1, 4A11.H4L2, 4G2.2G6, 6B3.2D3, 6H6.2D6, 9H2.2H10, 13G4.2F8, 13H12.2F8, 15G7.2A7, 19D9.2E5, 23B10.2B12, 24D12.2H9, F846C.1B2, F846C.1F5, F846C.1H12, F846C.1H5, F846C.2H3, F846TC.14A2, F846TC.14E4, F846TC.16B5, F846TC.7F10, F847C.10B9, F847C.11B1, F847C.12F12, F847C.26F5, F847C.4B10, F849C.8D10, F849C.8H3, 846.2B11, 846.4D5, 846T.1H2, 847.14H4, 846.2D4, 846.2F11, 846T.10B1, 846T.2E3, 846T.4C9, 846T.4E11, 846T.4F5, 846T.8D1, 847.10C9, 847.11D6, 847.15D12, 847.15F9, 847.15H11, 847.20H7, 847.21B11, 847.27B9, 847.28D1, 847.2B8, 847.3B3, 849.1D2, 849.2D7, 849.2F12, 849.4B2, 849.4F12, 849.4F2, 849.5C2, 849.8D12, F847C.21H6, 849.5H1, 847.23F11, 847.16D10, 847.13E2-mH0mL1, 847.13E2-mH0mL2, 847.12C4, 847.4D3, 2D10-VH0-VL0, 2D10-hVH4-HVL1, 2D10-hVH4-HVL2, 2D10-hVH4-HVL3, 2D10-hVH4-HVL4, 2D10-hVH3-HVL1, 2D10-hVH3-HVL2, 2D10-hVH3-HVL3, 2D10-hVH3-HVL4, 20H5.A3-VH3VL1, 20H5.A3-VH3VL3, 20H5.A3-VH4VL1, 20H5.A3-VH5VL1, 20H5.A3-VH5VL3, 20H5.A3-VH6VL1, 20H5.A3-VH6VL3, or a binding fragment thereof.

[0291] In some embodiments, the anti-Gal3 antibody or binding fragment thereof comprises, consists essentially of, or consists of TB001, TB006, 12G5.D7, 13A12.2E5, 14H10.2C9, 15F10.2D6, 19B5.2E6, 20D11.2C6, 20H5.A3, 23H9.2E4, 2D10.2B2, 3B11.2G2, 7D8.2D8, mIMT001, 4A11.2B5, 4A11.H1L1, 4A11.H4L2, 4G2.2G6, 6B3.2D3, 6H6.2D6, 9H2.2H10, 13G4.2F8, 13H12.2F8, 15G7.2A7, 19D9.2E5, 23B10.2B12, 24D12.2H9, F846C.1B2, F846C.1F5, F846C.1H12, F846C.1H5, F846C.2H3, F846TC.14A2, F846TC.14E4, F846TC.16B5, F846TC.7F10, F847C.10B9, F847C.11B1, F847C.12F12, F847C.26F5, F847C.4B10, F849C.8D10, F849C.8H3, 846.2B11, 846.4D5, 846T.1H2, 847.14H4, 846.2D4, 846.2F11, 846T.10B1, 846T.2E3, 846T.4C9, 846T.4E11, 846T.4F5, 846T.8D1, 847.10C9, 847.11D6, 847.15D12, 847.15F9, 847.15H11, 847.20H7, 847.21B11, 847.27B9, 847.28D1, 847.2B8, 847.3B3, 849.1D2, 849.2D7, 849.2F12, 849.4B2, 849.4F12, 849.4F2, 849.5C2, 849.8D12, F847C.21H6, 849.5H1, 847.23F11, 847.16D10, 847.13E2-mH0mL1, 847.13E2-mH0mL2, 847.12C4, 847.4D3, 2D10-VH0-VL0, 2D10-hVH4-HVL1, 2D10-hVH4-HVL2, 2D10-hVH4-HVL3, 2D10-hVH4-HVL4, 2D10-hVH3-HVL1, 2D10-hVH3-HVL2, 2D10-hVH3-HVL3, 2D10-hVH3-HVL4, 20H5.A3-VH3VL1, 20H5.A3-VH3VL3, 20H5.A3-VH4VL1, 20H5.A3-VH5VL1, 20H5.A3-VH5VL3, 20H5.A3-VH6VL1, 20H5.A3-VH6VL3, or a binding fragment thereof.

[0292] In some embodiments, the anti-Gal3 antibody or binding fragment thereof comprises one or more heavy chain variable region CDRs depicted in FIGS. 3A-C. In some embodiments, the anti-Gal3 antibody or binding fragment thereof comprises one or more light chain variable region CDRs depicted in FIGS. 4A-C. In some embodiments, the anti-Gal3 antibody or binding fragment thereof comprises a heavy chain variable region depicted in FIG. 5. In some embodiments, the anti-Gal3 antibody or binding fragment thereof comprises a light chain variable region depicted in FIG. 6. In some embodiments, the anti-Gal3 antibody or binding fragment thereof comprises a combination of heavy chain variable region and light chain variable region depicted in FIG. 8. In some embodiments, the anti-Gal3 antibody or binding fragment thereof comprises a heavy chain and/or light chain depicted in FIG. 9. In some embodiments, the anti-Gal3 antibody or binding fragment thereof can comprise or include any one or more of the sequences provided in any one or more of FIGS. 3A-C, 4A-C, 5, 6, 7, 8, 9, or any one or more of a sequence that is at least 80%, 81%, 82%, 83%, 84%, 85%, 86%, 87%, 88%, 89%, 90%, 91%, 92%, 93%, 94%, 95%, 96%, 97%, 98%, 99% or greater identical thereto. In some embodiments, the anti-Gal3 antibody or binding fragment thereof can comprise or include any one or more of the sequences provided in any one or more of FIGS. 3A-C, 4A-C, 5, 6, 7, 8, 9, or any one or more of a sequence that is at least 80%, 81%, 82%, 83%, 84%, 85%, 86%, 87%, 88%, 89%, 90%, 91%, 92%, 93%, 94%, 95%, 96%, 97%, 98%, 99% or greater similar thereto.

[0293] In some embodiments, the anti-Gal3 antibody or binding fragment thereof comprises a humanized antibody or binding fragment thereof. In other instances, the anti-Gal3 antibody or binding fragment thereof comprises a chimeric antibody or binding fragment thereof. In some embodiments, the anti-Gal3 antibody comprises a full-length antibody or a binding fragment thereof. In some embodiments, the anti-Gal3 antibody or binding fragment thereof comprises a bispecific antibody or a binding fragment thereof. In some embodiments, the anti-Gal3 antibody or binding fragment thereof comprises a monovalent Fab′, a divalent Fab2, a single-chain variable fragment (scFv), a diabody, a minibody, a nanobody, a single-domain antibody (sdAb), or a camelid antibody or binding fragment thereof.

[0294] In some embodiments, the anti-Gal3 antibody or binding fragment thereof is a bispecific antibody or binding fragment thereof. Exemplary bispecific antibody formats include, but are not limited to, Knobs-into-Holes (KiH), Asymmetric Re-engineering Technology-immunoglobulin (ART-Ig), Triomab quadroma, bispecific monoclonal antibody (BiMAb, BsmAb, BsAb, bsMab, BS-Mab, or Bi-MAb), Azymetric, Biclonics, Fab-scFv-Fc, Two-in-one/Dual Action Fab (DAF), FinomAb, scFv-Fc-(Fab)-fusion, Dock-aNd-Lock (DNL), Tandem diAbody (TandAb), Dual-affinity-ReTargeting (DART), nanobody, triplebody, tandems scFv (taFv), triple heads, tandem dAb/VHH, triple dAb/VHH, or tetravalent dAb/VHH. In some embodiments, the anti-Gal3 antibody or binding fragment thereof is a bispecific antibody or binding fragment thereof comprising a bispecific antibody format illustrated in Brinkmann and Kontermann, “The making of bispecific antibodies,” MABS 9(2): 182-212 (2017).

[0295] In some embodiments, the anti-Gal3 antibody or binding fragment thereof can comprise an IgM, IgG (e.g., IgG1, IgG2, IgG3, or IgG4), IgA, or IgE framework. The IgG framework can be IgG1, IgG2, IgG3 or IgG4. In some embodiments, the anti-Gal3 antibody or binding fragment thereof comprises an IgG1 framework. In some embodiments, the anti-Gal3 antibody or binding fragment thereof comprises an IgG2 framework. In some embodiments, the anti-Gal3 antibody or binding fragment thereof comprises an IgG4 framework. The anti-Gal3 antibody or binding fragment thereof can further comprise a Fc mutation.

[0296] In some embodiments, the Fc region comprises one or more mutations that modulate Fc receptor interactions, e.g., to enhance effector functions such as ADCC and/or CDC. In such instances, exemplary residues when mutated modulate effector functions include S239, K326, A330, I332, or E333, in which the residue position correspond to IgG1 and the residue numbering is in accordance to Kabat numbering (EU index of Kabat et al 1991 Sequences of Proteins of Immunological Interest). In some embodiments, the one or more mutations comprise S239D, K326W, A330L, I332E, E333A, E333S, or a combination thereof. In some embodiments, the one or more mutations comprise S239D, I332E, or a combination thereof. In some embodiments, the one or more mutations comprise S239D, A330L, I332E, or a combination thereof. In some embodiments, the one or more mutations comprise K326W, E333S, or a combination thereof. In some embodiments, the mutation comprises E333A.

[0297] In some embodiments, an anti-Gal3 antibody or binding fragment thereof comprises a humanization score of above 70, above 80, above 81, above 82, above 83, above 84, above 85, above 86, above 87, above 88, above 89, above 90, or above 95. In some embodiments, the anti-Gal3 antibody or binding fragment thereof comprises a humanization score of above 80. In some embodiments, the anti-Gal3 antibody or binding fragment thereof comprises a humanization score of above 83. In some embodiments, the anti-Gal3 antibody or binding fragment thereof comprises a humanization score of above 85. In some embodiments, the anti-Gal3 antibody or binding fragment thereof comprises a humanization score of above 87. In some embodiments, the anti-Gal3 antibody or binding fragment thereof comprises a humanization score of above 90. In some embodiments, the anti-Gal3 antibody or binding fragment thereof comprises a humanization score of the heavy chain of above 70, above 80, above 81, above 82, above 83, above 84, above 85, above 86, above 87, above 88, above 89, above 90, or above 95, optionally above 80, above 85, or above 87. In some embodiments, the anti-Gal3 antibody or binding fragment thereof comprises a humanization score of the light chain of above 70, above 80, above 81, above 82, above 83, above 84, above 85, above 86, above 87, above 88, above 89, above 90, or above 95, optionally above 80, above 83, or above 85.

### Pharmaceutical Formulations

[0298] A pharmaceutical formulation for treating a disease as provided herein can comprise an anti-Gal3 antibody or binding fragment thereof described herein. The anti-Gal3 antibody or binding fragment thereof can be formulated for systemic administration. Alternatively, the anti-Gal3 antibody or binding fragment thereof can be formulated for parenteral administration.

[0299] In some embodiments, an anti-Gal3 antibody or binding fragment thereof is formulated as a pharmaceutical composition for administration to a subject by, but not limited to, parenteral (e.g., intravenous, subcutaneous, intramuscular, intraarterial, intradermal, intraperitoneal, intravitreal, intracerebral, or intracerebroventricular), oral, intranasal, buccal, rectal, or transdermal administration routes. In some instances, the pharmaceutical composition described herein is formulated for parenteral (e.g., intravenous, subcutaneous, intramuscular, intraarterial, intradermal, intraperitoneal, intravitreal, intracerebral, or intracerebroventricular) administration. In other instances, the pharmaceutical composition described herein is formulated for systemic administration. In other instances, the pharmaceutical composition described herein is formulated for oral administration. In still other instances, the pharmaceutical composition described herein is formulated for intranasal administration. In some embodiments, the antibodies or binding fragments thereof disclosed herein are provided in a subcutaneous formulation or an intravenous formulation. In some embodiments, the antibodies or binding fragments thereof disclosed herein are provided in an intravenous formulation.

[0300] In some instances, the pharmaceutical compositions further include pH adjusting agents or buffering agents which include acids such as acetic, boric, citric, lactic, phosphoric and hydrochloric acids; bases such as sodium hydroxide, sodium phosphate, sodium borate, sodium citrate, sodium acetate, sodium lactate and trishydroxymethylaminomethane; and buffers such as citrate/dextrose, sodium bicarbonate and ammonium chloride. Such acids, bases and buffers are included in an amount required to maintain pH of the composition in an acceptable range.

[0301] In some instances, the pharmaceutical compositions include one or more salts in an amount required to bring osmolality of the composition into an acceptable range. Such salts include those having sodium, potassium or ammonium cations and chloride, citrate, ascorbate, borate, phosphate, bicarbonate, sulfate, thiosulfate or bisulfite anions; suitable salts include sodium chloride, potassium chloride, sodium thiosulfate, sodium bisulfite and ammonium sulfate.

[0302] In some instances, the pharmaceutical compositions further include diluent which are used to stabilize compounds because they can provide a more stable environment. Salts dissolved in buffered solutions (which also can provide pH control or maintenance) are utilized as diluents in the art, including, but not limited to a phosphate buffered saline solution. In certain instances, diluents increase bulk of the composition to facilitate compression or create sufficient bulk for homogenous blend for capsule filling. Such compounds can include e.g., lactose, starch, mannitol, sorbitol, dextrose, microcrystalline cellulose such as Avicel®; dibasic calcium phosphate, dicalcium phosphate dihydrate; tricalcium phosphate, calcium phosphate; anhydrous lactose, spray-dried lactose; pregelatinized starch, compressible sugar, such as Di-Pac® (Amstar); mannitol, hydroxypropylmethylcellulose, hydroxypropylmethylcellulose acetate stearate, sucrose-based diluents, confectioner’s sugar; monobasic calcium sulfate monohydrate, calcium sulfate dihydrate; calcium lactate trihydrate, dextrates; hydrolyzed cereal solids, amylose; powdered cellulose, calcium carbonate; glycine, kaolin; mannitol, sodium chloride; inositol, bentonite, and the like.

[0303] In some embodiments, the pharmaceutical formulations include, but are not limited to, aqueous liquid dispersions, self-emulsifying dispersions, solid solutions, liposomal dispersions, aerosols, solid dosage forms, powders, immediate release formulations, controlled release formulations, fast melt formulations, tablets, capsules, pills, delayed release formulations, extended release formulations, pulsatile release formulations, multi-particulate formulations (e.g., nanoparticle formulations), and mixed immediate and controlled release formulations.

[0304] Provided herein in some embodiments are pharmaceutical formulations of any one or more of the anti-Gal3 antibodies or binding fragments disclosed herein. These pharmaceutical formulations may be in the form of prepared solutions that are compatible for administration, such as contained in a sterile IV infusion bag or other container. In some embodiments, the pharmaceutical formulations are prepared as unit doses. In some embodiments, the pharmaceutical formulations are unit doses formulated as 50, 60, 70, 80, 90, 100, 200, 300, 400, 500, 600, 700, 800, 900, 1000, 1100, 1200, 1300, 1400, 1500, 1600, 1700, 1800, 1900, 2000, 2500, 3000, 3500, 4000, 4500 or 5000 mg of the anti-Gal3 antibody or binding fragment thereof per unit dose, or any amount per unit dose within a range defined by any two of the aforementioned amounts per unit dose. In some embodiments, the pharmaceutical formulations are unit doses formulated as 1000 mg or about 1000 mg of the anti-Gal3 antibody or binding fragment thereof. In some embodiments, the pharmaceutical formulations are unit doses (such as in the amounts provided herein) prepared in 100, 110, 120, 130, 140, 150, 160, 170, 180, 190, 200, 210, 220, 230, 240, 250, 260, 270, 280, 290, or 300 mL of sterile saline or other compatible excipient, carrier, or diluent known in the art. In some embodiments, the pharmaceutical formulations are unit doses (such as in the amounts provided herein) prepared in 250 mL or about 250 mL of sterile saline or other compatible excipient, carrier, or diluent known in the art.

[0305] Also provided herein are pharmaceutical formulations comprising 1000 mg or about 1000 mg of an anti-Gal3 antibody or binding fragment thereof dissolved in 250 mL or about 250 mL of saline. In some embodiments, the pharmaceutical formulation is prepared in an IV infusion bag.

[0306] Also provided herein are pharmaceutical formulations comprising 1000 mg or about 1000 mg of an anti-Gal3 antibody diluted in 0.9% Sodium Chloride Injection, USP (normal sterile saline) in a volume of 250 mL. In some embodiments, the anti-Gal3 antibody is TB006.

[0307] Also provided herein are single-use sealed injectable glass vials comprising a pharmaceutical formulation of any one or more of the anti-Gal3 antibodies or binding fragments thereof disclosed herein. In some embodiments, the vials comprise 4, 5, 6, 7, 8, 9, 10, 11, or 12 mL of a concentrated solution of the anti-Gal3 antibody or binding fragment thereof. In some embodiments, the vials comprise 8 mL of a concentrated solution of the anti-Gal3 antibody or binding fragment thereof. In some embodiments, the concentrated solution, which is meant to be diluted prior to administration, is 15, 16, 17, 18, 19, 20, 21, 22, 23, 24, or 25 mg/mL. In some embodiments, the concentrated solution, which is meant to be diluted prior to administration, is 20 mg/mL of the anti-Gal3 antibody or binding fragment thereof. In some embodiments, the pharmaceutical compositions disclosed herein for administration (e.g. those prepared in an IV infusion bag or other container) may be prepared by diluting the concentrated solution in the vials.

[0308] Also provided herein are single-use sealed injectable glass vials comprising 8 mL or about 8 mL of 20 mg/mL or about 20 mg/mL (i.e. total of 160 mg or about 160 mg) of an anti-Gal3 antibody or binding fragment thereof.

[0309] Also provided herein are pharmaceutical formulations comprising TB006 supplied in 8 mL glass vials, sealed with a rubber stopper and an aluminum flip top, with a strength of 160 mg (20 mg/mL, 8 mL) TB006 per vial. In some embodiments, the pharmaceutical formulation is stored at 2-8° C.

### Polynucleotides and Vectors

[0310] In some embodiments, the present disclosure provides isolated nucleic acids encoding any of the anti-Gal3 antibodies or binding fragments thereof disclosed herein. In another embodiment, the present disclosure provides vectors comprising a nucleic acid sequence encoding any anti-Gal3 antibody or binding fragment thereof disclosed herein. In some embodiments, this disclosure provides isolated nucleic acids that encode heavy chain variable regions, light chain variable regions, heavy chains, or light chains of an anti-Gal3 antibody or binding fragment thereof disclosed herein.

[0311] In some embodiments, nucleic acid sequences encoding for heavy chain variable regions are depicted in FIG. 14 (SEQ ID NOs: 539-620, 797, 866-880). In some embodiments, nucleic acid sequences encoding for light chain variable regions are depicted in FIG. 15 (SEQ ID NOs: 621-702, 798, 881-895). In some embodiments, nucleic acid sequences encoding for heavy chains are depicted in FIG. 16 (SEQ ID NO: 703-749, 799, 896-910). In some embodiments, nucleic acid sequences encoding for light chains are depicted in FIG. 17 (SEQ ID NO: 750-796, 800, 911-925).

[0312] Any one of the anti-Gal3 antibodies or binding fragments thereof described herein can be prepared by recombinant DNA technology, synthetic chemistry techniques, or a combination thereof. For instance, sequences encoding the desired components of the anti-Gal3 antibodies, including light chain CDRs and heavy chain CDRs are typically assembled cloned into an expression vector using standard molecular techniques known in the art. These sequences may be assembled from other vectors encoding the desired protein sequence, from PCR-generated fragments using respective template nucleic acids, or by assembly of synthetic oligonucleotides encoding the desired sequences. Expression systems can be created by transfecting a suitable cell with an expressing vector which comprises an anti-Gal3 antibody of interest or binding fragment thereof.

[0313] Nucleotide sequences corresponding to various regions of light or heavy chains of an existing antibody can be readily obtained and sequenced using convention techniques including but not limited to hybridization, PCR, and DNA sequencing. Hybridoma cells that produce monoclonal antibodies serve as a preferred source of antibody nucleotide sequences. A vast number of hybridoma cells producing an array of monoclonal antibodies may be obtained from public or private repositories. The largest depository agent is American Type Culture Collection, which offers a diverse collection of well-characterized hybridoma cell lines. Alternatively, antibody nucleotides can be obtained from immunized or non-immunized rodents or humans, and form organs such as spleen and peripheral blood lymphocytes.

[0314] Polynucleotides encoding anti-Gal3 antibodies or binding fragments thereof can also be modified, for example, by substituting the coding sequence for human heavy and light chain constant regions in place of the homologous non-human sequences. In that manner, chimeric antibodies are prepared that retain the binding specificity of the original anti-Gal3 antibody or binding fragment thereof.

[0315] Also disclosed herein are methods of producing an anti-Gal3 antibody or binding fragment thereof. In some embodiments, the methods comprise expressing a nucleic acid that encodes for the anti-Gal3 antibody or binding fragment thereof in a cell and isolating the expressed anti-Gal3 antibody or binding fragment thereof from the cell. In some embodiments, the methods further comprise concentrating the anti-Gal3 antibody or binding fragment thereof to a desired concentration. In some embodiments, the cell is a mammalian cell, insect cell, or bacterial cell. In some embodiments, the anti-Gal3 antibody or binding fragment thereof is any one of the anti-Gal3 antibodies or binding fragments disclosed herein. Specific procedures of expressing antibodies in a cell and isolation of the expressed antibodies are conventionally known and can be practiced by one skilled in the art.

### Antibody Production

[0316] In some cases, anti-Gal3 antibodies or binding fragments thereof are raised by standard protocol by injecting a production animal with an antigenic composition. See, e.g., Harlow and Lane, Antibodies: A Laboratory Manual, Cold Spring Harbor Laboratory, 1988. When utilizing an entire protein, or a larger section of the protein, antibodies may be raised by immunizing the production animal with the protein and a suitable adjuvant (e.g., Freund’s, Freund’s complete, oil-in-water emulsions, etc.). When a smaller peptide is utilized, it is advantageous to conjugate the peptide with a larger molecule to make an immunostimulatory conjugate. Commonly utilized conjugate proteins that are commercially available for such use include bovine serum albumin (BSA) and keyhole limpet hemocyanin (KLH). In order to raise antibodies to particular epitopes, peptides derived from the full sequence may be utilized. Alternatively, in order to generate antibodies to relatively short peptide portions of the protein target, a superior immune response may be elicited if the polypeptide is joined to a carrier protein, such as ovalbumin, BSA or KLH.

[0317] Polyclonal or monoclonal anti-Gal3 antibodies or binding fragments thereof can be produced from animals which have been genetically altered to produce human immunoglobulins. A transgenic animal can be produced by initially producing a “knock-out” animal which does not produce the animal’s natural antibodies, and stably transforming the animal with a human antibody locus (e.g., by the use of a human artificial chromosome). In such cases, only human antibodies are then made by the animal. Techniques for generating such animals, and deriving antibodies therefrom, are described in U.S. Pat. Nos. 6,162,963 and 6,150,584, each incorporated fully herein by reference in its entirety. Such antibodies can be referred to as human xenogenic antibodies.

[0318] Alternatively, anti-Gal3 antibodies or binding fragments thereof can be produced from phage libraries containing human variable regions. See U.S. Pat. No. 6,174,708, incorporated fully herein by reference in its entirety.

[0319] In some aspects of any of the embodiments disclosed herein, an anti-Gal3 antibody or binding fragment thereof is produced by a hybridoma.

[0320] For monoclonal anti-Gal3 antibodies, hybridomas may be formed by isolating the stimulated immune cells, such as those from the spleen of the inoculated animal. These cells can then be fused to immortalized cells, such as myeloma cells or transformed cells, which are capable of replicating indefinitely in cell culture, thereby producing an immortal, immunoglobulin-secreting cell line. The immortal cell line utilized can be selected to be deficient in enzymes necessary for the utilization of certain nutrients. Many such cell lines (such as myelomas) are known to those skilled in the art, and include, for example: thymidine kinase (TK) or hypoxanthine-guanine phosphoriboxyl transferase (HGPRT). These deficiencies allow selection for fused cells according to their ability to grow on, for example, hypoxanthine aminopterinthymidine medium (HAT).

[0321] In addition, the anti-Gal3 antibody or binding fragment thereof may be produced by genetic engineering.

[0322] Anti-Gal3 antibodies or binding fragments thereof disclosed herein can have a reduced propensity to induce an undesired immune response in humans, for example, anaphylactic shock, and can also exhibit a reduced propensity for priming an immune response which would prevent repeated dosage with an antibody therapeutic or imaging agent (e.g., the human-anti-murine-antibody “HAMA” response). Such anti-Gal3 antibodies or binding fragments thereof include, but are not limited to, humanized, chimeric, or xenogenic human anti-Gal3 antibodies or binding fragments thereof.

[0323] Chimeric anti-Gal3 antibodies or binding fragments thereof can be made, for example, by recombinant means by combining the murine variable light and heavy chain regions (VK and VH), obtained from a murine (or other animal-derived) hybridoma clone, with the human constant light and heavy chain regions, in order to produce an antibody with predominantly human domains. The production of such chimeric antibodies is well known in the art and may be achieved by standard means (as described, e.g., in U.S. Pat. No. 5,624,659, incorporated fully herein by reference).

[0324] The term “humanized” as applies to a non-human (e.g. rodent or primate) antibodies are hybrid immunoglobulins, immunoglobulin chains or fragments thereof which contain minimal sequence derived from non-human immunoglobulin. For the most part, humanized antibodies are human immunoglobulins (recipient antibody) in which residues from a complementary determining region (CDR) of the recipient are replaced by residues from a CDR of a non-human species (donor antibody) such as mouse, rat, rabbit or primate having the desired specificity, affinity and capacity. In some instances, Fv framework region (FR) residues of the human immunoglobulin are replaced by corresponding non-human residues. Furthermore, the humanized antibody may comprise residues which are found neither in the recipient antibody nor in the imported CDR or framework sequences. These modifications are made to further refine and optimize antibody performance and minimize immunogenicity when introduced into a human body. In some examples, the humanized antibody will comprise substantially all of at least one, and typically two, variable domains, in which all or substantially all of the CDR regions correspond to those of a non-human immunoglobulin and all or substantially all of the FR regions are those of a human immunoglobulin sequence. The humanized antibody may also comprise at least a portion of an immunoglobulin constant region (Fc), typically that of a human immunoglobulin.

[0325] Humanized antibodies can be engineered to contain human-like immunoglobulin domains and incorporate only the complementarity-determining regions of the animal-derived antibody. This can be accomplished by carefully examining the sequence of the hyper-variable loops of the variable regions of a monoclonal antigen binding unit or monoclonal antibody and fitting them to the structure of a human antigen binding unit or human antibody chains. See, e.g., U.S. Pat. No. 6,187,287, incorporated fully herein by reference.

[0326] Methods for humanizing non-human antibodies are well known in the art. “Humanized” antibodies are antibodies in which at least part of the sequence has been altered from its initial form to render it more like human immunoglobulins. In some versions, the heavy (H) chain and light (L) chain constant (C) regions are replaced with human sequence. This can be a fusion polypeptide comprising a variable (V) region and a heterologous immunoglobulin C region. In some versions, the complementarity determining regions (CDRs) comprise non-human antibody sequences, while the V framework regions have also been converted to human sequences. See, for example, EP 0329400. In some versions, V regions are humanized by designing consensus sequences of human and mouse V regions and converting residues outside the CDRs that are different between the consensus sequences.

[0327] In principle, a framework sequence from a humanized antibody can serve as the template for CDR grafting; however, it has been demonstrated that straight CDR replacement into such a framework can lead to significant loss of binding affinity to the antigen. Glaser et al. (1992) J. Immunol. 149:2606; Tempest et al. (1992) Biotechnology 9:266; and Shalaby et al. (1992) J. Exp. Med. 17:217. The more homologous a human antibody (HuAb) is to the original murine antibody (muAb), the less likely that the human framework will introduce distortions into the murine CDRs that could reduce affinity. Based on a sequence homology search against an antibody sequence database, the HuAb IC4 provides good framework homology to muM4TS.22, although other highly homologous HuAbs would be suitable as well, especially kappa L chains from human subgroup I or H chains from human subgroup III. Kabat et al. (1987). Various computer programs such as ENCAD (Levitt et al. (1983) J. Mol. Biol. 168:595) are available to predict the ideal sequence for the V region. The disclosure thus encompasses HuAbs with different variable (V) regions. It is within the skill of one in the art to determine suitable V region sequences and to optimize these sequences. Methods for obtaining antibodies with reduced immunogenicity are also described in U.S. Pat. No. 5,270,202 and EP 699,755, each hereby incorporated by reference in its entirety.

[0328] Humanized antibodies can be prepared by a process of analysis of the parental sequences and various conceptual humanized products using three dimensional models of the parental and humanized sequences. Three-dimensional immunoglobulin models are familiar to those skilled in the art. Computer programs are available which illustrate and display probable three-dimensional conformational structures of selected candidate immunoglobulin sequences. Inspection of these displays permits analysis of the likely role of the residues in the functioning of the candidate immunoglobulin sequence, i.e., the analysis of residues that influence the ability of the candidate immunoglobulin to bind its antigen. In this way, FR residues can be selected and combined from the consensus and import sequence so that the desired antibody characteristic, such as increased affinity for the target antigen(s), is achieved.

[0329] A process for humanization of subject antigen binding units can be as follows. The best-fit germline acceptor heavy and light chain variable regions are selected based on homology, canonical structure and physical properties of the human antibody germlines for grafting. Computer modeling of mVH/VL versus grafted hVH/VL is performed and prototype humanized antibody sequence is generated. If modeling indicated a need for framework back-mutations, second variant with indicated FW changes is generated. DNA fragments encoding the selected germline frameworks and murine CDRs are synthesized. The synthesized DNA fragments are subcloned into IgG expression vectors and sequences are confirmed by DNA sequencing. The humanized antibodies are expressed in cells, such as 293F and the proteins are tested, for example in MDM phagocytosis assays and antigen binding assays. The humanized antigen binding units are compared with parental antigen binding units in antigen binding affinity, for example, by FACS on cells expressing the target antigen. If the affinity is greater than 2-fold lower than parental antigen binding unit, a second round of humanized variants can be generated and tested as described above.

[0330] As noted above, an anti-Gal3 antibody or binding fragment thereof can be either “monovalent” or “multivalent.” Whereas the former has one binding site per antigen-binding unit, the latter contains multiple binding sites capable of binding to more than one antigen of the same or different kind. Depending on the number of binding sites, antigen binding units may be bivalent (having two antigen-binding sites), trivalent (having three antigen-binding sites), tetravalent (having four antigen-binding sites), and so on.

[0331] Multivalent anti-Gal3 antibodies or binding fragments thereof can be further classified on the basis of their binding specificities. A “monospecific” anti-Gal3 antibody or binding fragment thereof is a molecule capable of binding to one or more antigens of the same kind. A “multispecific” anti-Gal3 antibody or binding fragment thereof is a molecule having binding specificities for at least two different antigens. While such molecules normally will only bind two distinct antigens (i.e. bispecific anti-Gal3 antibodies), antibodies with additional specificities such as trispecific antibodies are encompassed by this expression when used herein. This disclosure further provides multispecific anti-Gal3 antibodies. Multispecific anti-Gal3 antibodies or binding fragments thereof are multivalent molecules capable of binding to at least two distinct antigens, e.g., bispecific and trispecific molecules exhibiting binding specificities to two and three distinct antigens, respectively.

[0332] In some embodiments, the methods further provide for screening for or identifying antibodies or binding fragments thereof capable of disrupting an interaction between Gal3 and a target protein, such as a target protein associated with stroke, traumatic brain injury, fibrin disorders, atherosclerosis, cardiovascular disease, or any other disease or disorder envisioned herein. In some aspects, the method may comprise: (a) contacting Gal3 protein with an antibody or binding fragment thereof that selectively binds to Gal3, thereby forming a Gal3-antibody complex; (b) contacting the Gal3-antibody complex with the target protein; (c) removing unbound target protein; and (d) detecting the target protein bound to the Gal3-antibody complex, wherein the antibody or binding fragment thereof is capable of disrupting an interaction of Gal3 and the target protein when the target protein is not detected in (d). In some cases, the method comprises an immunoassay. In some cases, the immunoassay is an enzyme-linked immunosorbent assay (ELISA).

### Host Cells

[0333] In some embodiments, the present disclosure provides host cells expressing any one of the anti-Gal3 antibodies or binding fragments thereof disclosed herein. A subject host cell typically comprises a nucleic acid encoding any one of the anti-Gal3 antibodies or binding fragments thereof disclosed herein.

[0334] The disclosure provides host cells transfected with the polynucleotides, vectors, or a library of the vectors described above. The vectors can be introduced into a suitable prokaryotic or eukaryotic cell by any of a number of appropriate means, including electroporation, microprojectile bombardment; lipofection, infection (where the vector is coupled to an infectious agent), transfection employing calcium chloride, rubidium chloride, calcium phosphate, DEAE-dextran, or other substances. The choice of the means for introducing vectors will often depend on features of the host cell.

[0335] For most animal cells, any of the above-mentioned methods is suitable for vector delivery. Preferred animal cells are vertebrate cells, preferably mammalian cells, capable of expressing exogenously introduced gene products in large quantity, e.g. at the milligram level. Non-limiting examples of preferred cells are NIH3T3 cells, COS, HeLa, and CHO cells.

[0336] Once introduced into a suitable host cell, expression of the anti-Gal3 antibodies or binding fragments thereof can be determined using any nucleic acid or protein assay known in the art. For example, the presence of transcribed mRNA of light chain CDRs or heavy chain CDRs, or the anti-Gal3 antibody or binding fragment thereof can be detected and/or quantified by conventional hybridization assays (e.g. Northern blot analysis), amplification procedures (e.g. RT-PCR), SAGE (U.S. Pat. No. 5,695,937), and array-based technologies (see e.g. U.S. Pat. Nos. 5,405,783, 5,412,087 and 5,445,934), using probes complementary to any region of a polynucleotide that encodes the anti-Gal3 antibody or binding fragment thereof.

[0337] Expression of the vector can also be determined by examining the expressed anti-Gal3 antibody or binding fragment thereof. A variety of techniques are available in the art for protein analysis. They include but are not limited to radioimmunoassays, ELISA (enzyme linked immunoradiometric assays), “sandwich” immunoassays, immunoradiometric assays, in situ immunoassays (using e.g., colloidal gold, enzyme or radioisotope labels), western blot analysis, immunoprecipitation assays, immunofluorescent assays, and SDS-PAGE.

### Payload

[0338] In some embodiments, any anti-Gal3 antibody disclosed herein further comprises a payload. In some cases, the payload comprises a small molecule, a protein or functional fragment thereof, a peptide, or a nucleic acid polymer.

[0339] In some cases, the number of payloads conjugated to the anti-Gal3 antibody (e.g., the drug-to-antibody ratio or DAR) is about 1:1, one payload to one anti-Gal3 antibody. In some cases, the ratio of the payloads to the anti-Gal3 antibody is about 2:1, 3:1, 4:1, 5:1, 6:1, 7:1, 8:1, 9:1, 10:1, 11:1, 12:1, 13:1, 14:1, 15:1, 16:1, 17:1, 18:1, 19:1, or 20:1. In some cases, the ratio of the payloads to the anti-Gal3 antibody is about 2:1. In some cases, the ratio of the payloads to the anti-Gal3 antibody is about 3:1. In some cases, the ratio of the payloads to the anti-Gal3 antibody is about 4:1. In some cases, the ratio of the payloads to the anti-Gal3 antibody is about 6:1. In some cases, the ratio of the payloads to the anti-Gal3 antibody is about 8:1. In some cases, the ratio of the payloads to the anti-Gal3 antibody is about 12:1.

[0340] In some embodiment, the payload is a small molecule. In some instances, the small molecule is a cytotoxic payload. Exemplary cytotoxic payloads include, but are not limited to, microtubule disrupting agents, DNA modifying agents, or Akt inhibitors.

[0341] In some embodiments, the payload comprises a microtubule disrupting agent. Exemplary microtubule disrupting agents include, but are not limited to, 2-methoxyestradiol, auristatin, chalcones, colchicine, combretastatin, cryptophycin, dictyostatin, discodermolide, dolastain, eleutherobin, epothilone, halichondrin, laulimalide, maytansine, noscapinoid, paclitaxel, peloruside, phomopsin, podophyllotoxin, rhizoxin, spongistatin, taxane, tubulysin, vinca alkaloid, vinorelbine, or derivatives or analogs thereof.

[0342] In some embodiments, the maytansine is a maytansinoid. In some embodiments, the maytansinoid is DM1, DM4, or ansamitocin. In some embodiments, the maytansinoid is DM1. In some embodiments, the maytansinoid is DM4. In some embodiments, the maytansinoid is ansamitocin. In some embodiments, the maytansinoid is a maytansionid derivative or analog such as described in U.S. Pat. Nos. 5208020, 5416064, 7276497, and 6716821 or U.S. Publication Nos. 2013029900 and US20130323268.

[0343] In some embodiments, the payload is a dolastatin, or a derivative or analog thereof. In some embodiments, the dolastatin is dolastatin 10 or dolastatin 15, or derivatives or analogs thereof. In some embodiments, the dolastatin 10 analog is auristatin, soblidotin, symplostatin 1, or symplostatin 3. In some embodiments, the dolastatin 15 analog is cemadotin or tasidotin.

[0344] In some embodiments, the dolastatin 10 analog is auristatin or an auristatin derivative. In some embodiments, the auristatin or auristatin derivative is auristatin E (AE), auristatin F (AF), auristatin E5-benzoylvaleric acid ester (AEVB), monomethyl auristatin E (MMAE), monomethyl auristatin F (MMAF), or monomethyl auristatin D (MMAD), auristatin PE, or auristatin PYE. In some embodiments, the auristatin derivative is monomethyl auristatin E (MMAE). In some embodiments, the auristatin derivative is monomethyl auristatin F (MMAF). In some embodiments, the auristatin is an auristatin derivative or analog such as described in U.S. Pat. No. 6884869, 7659241, 7498298, 7964566, 7750116, 8288352, 8703714, and 8871720.

[0345] In some embodiments, the payload comprises a DNA modifying agent. In some embodiments, the DNA modifying agent comprises DNA cleavers, DNA intercalators, DNA transcription inhibitors, or DNA cross-linkers. In some instances, the DNA cleaver comprises bleomycine A2, calicheamicin, or derivatives or analogs thereof. In some instances, the DNA intercalator comprises doxorubicin, epirubicin, PNU-159682, duocarmycin, pyrrolobenzodiazepine, oligomycin C, daunorubicin, valrubicin, topotecan, or derivatives or analogs thereof. In some instances, the DNA transcription inhibitor comprises dactinomycin. In some instances, the DNA cross-linker comprises mitomycin C.

[0346] In some embodiments, the DNA modifying agent comprises amsacrine, anthracycline, camptothecin, doxorubicin, duocarmycin, enediyne, etoposide, indolinobenzodiazepine, netropsin, teniposide, or derivatives or analogs thereof.

[0347] In some embodiments, the anthracycline is doxorubicin, daunorubicin, epirubicin, idarubicin, mitomycin-C, dactinomycin, mithramycin, nemorubicin, pixantrone, sabarubicin, or valrubicin.

[0348] In some embodiments, the analog of camptothecin is topotecan, irinotecan, silatecan, cositecan, exatecan, lurtotecan, gimatecan, belotecan, rubitecan, or SN-38.

[0349] In some embodiments, the duocarmycin is duocarmycin A, duocarmycin B1, duocarmycin B2, duocarmycin C1, duocarmycin C2, duocarmycin D, duocarmycin SA, or CC-1065. In some embodiments, the enediyne is a calicheamicin, esperamicin, or dynemicin A.

[0350] In some embodiments, the pyrrolobenzodiazepine is anthramycin, abbeymycin, chicamycin, DC-81, mazethramycin, neothramycins A, neothramycin B, porothramycin, prothracarcin, sibanomicin (DC-102), sibiromycin, or tomaymycin. In some embodiments, the pyrrolobenzodiazepine is a tomaymycin derivative, such as described in U.S. Pat. Nos. 8404678 and 8163736. In some embodiments, the pyrrolobenzodiazepine is such as described in U.S. Pat. Nos. 8426402, 8802667, 8809320, 6562806, 6608192, 7704924, 7067511, US7612062, 7244724, 7528126, 7049311, 8633185, 8501934, and 8697688 and U.S. Publication No. US20140294868.

[0351] In some embodiments, the pyrrolobenzodiazepine is a pyrrolobenzodiazepine dimer. In some embodiments, the PBD dimer is a symmetric dimer. Examples of symmetric PBD dimers include, but are not limited to, SJG-136 (SG-2000), ZC-423 (SG2285), SJG-720, SJG-738, ZC-207 (SG2202), and DSB-120. In some embodiments, the PBD dimer is an unsymmetrical dimer. Examples of unsymmetrical PBD dimers include, but are not limited to, SJG-136 derivatives such as described in U.S. Pat. Nos. 8697688 and 9242013 and U.S. Publication No. 20140286970.

[0352] In some embodiments, the payload comprises an Akt inhibitor. In some cases, the Akt inhibitor comprises ipatasertib (GDC-0068) or derivatives thereof.

[0353] In some embodiments, the payload comprises a polymerase inhibitor, including, but not limited to polymerase II inhibitors such as a-amanitin, and poly(ADP-ribose) polymerase (PARP) inhibitors. Exemplary PARP inhibitors include, but are not limited to Iniparib (BSI 201), Talazoparib (BMN-673), Olaparib (AZD-2281), Olaparib, Rucaparib (AG014699, PF-01367338), Veliparib (ABT-888), CEP 9722, MK 4827, BGB-290, or 3-aminobenzamide.

[0354] In some embodiments, the payload comprises a detectable moiety. As used herein, a “detectable moiety” may comprise an atom, molecule, or compound that is useful in diagnosing, detecting or visualizing a location and/or quantity of a target molecule, cell, tissue, organ, and the like. Detectable moieties that can be used in accordance with the embodiments herein include, but are not limited to, radioactive substances (e.g. radioisotopes, radionuclides, radiolabels or radiotracers), dyes, contrast agents, fluorescent compounds or molecules, bioluminescent compounds or molecules, enzyme and enhancing agents (e.g. paramagnetic ions), or specific binding moieties such as streptavidin, avidin, or biotin. In addition, some nanoparticles, for example quantum dots or metal nanoparticles can be suitable for use as a detectable moiety.

[0355] Exemplary radioactive substances that can be used as detectable moieties in accordance with the embodiments herein include, but are not limited to, ¹⁸F, ¹⁸F-FAC, ³²P, ³³P, ⁴⁵Ti, ⁴⁷Sc ⁵²Fe, ⁵⁹Fe, ⁶²Cu, ⁶⁴Cu, ⁶⁷Cu ⁶⁷Ga, ⁶⁸Ga ⁷⁵Sc, ⁷⁷As, ⁸⁶Y, ⁹⁰Y, ⁸⁹Sr, ⁸⁹Zr, ⁹⁴Tc, ⁹⁴Tc, ⁹⁹mTc, ⁹⁹Mo, ¹⁰⁵Pd, ¹⁰⁵Rh, ¹¹¹Ag, ¹¹¹In, ¹²³I, ¹²⁴I, ¹²⁵I, ¹³¹I, ¹⁴²Pr, ¹⁴³Pr, ¹⁴⁹Pm, ¹⁵³Sm, ¹⁵⁴⁻¹⁵⁸Gd, ¹⁶¹Tb, ¹⁶⁶Dy, ¹⁶⁶Ho, ¹⁶⁹Er, ¹⁷⁵Lu, ¹⁷⁷Lu, ¹⁸⁶Re, ¹⁸⁸Re, ¹⁸⁹Re, ¹⁹⁴Ir, ¹⁹⁸Au, ¹⁹⁹Au, ²¹¹At, ²¹¹Pb, ²¹²Bi, ²¹²Pb, ²¹³Bi, ²²³Ra and ²²⁵Ac. Exemplary paramagnetic ions substances that can be used as detectable markers include, but are not limited to ions of transition and lanthanide metals (e.g. metals having atomic numbers of 6 to 9, 21-29, 42, 43, 44, or 57-71). These metals include ions of Cr, V, Mn, Fe, Co, Ni, Cu, La, Ce, Pr, Nd, Pm, Sm, Eu, Gd, Tb, Dy, Ho, Er, Tm, Yb and Lu.

[0356] When the detectable marker is a radioactive metal or paramagnetic ion, in some embodiments, the marker can be reacted with a reagent having a long tail with one or more chelating groups attached to the long tail for binding these ions. The long tail can be a polymer such as a polylysine, polysaccharide, or other derivatized or derivatizable chain having pendant groups to which may be bound to a chelating group for binding the ions. Examples of chelating groups that may be used according to the embodiments herein include, but are not limited to, ethylenediaminetetraacetic acid (EDTA), diethylenetriaminepentaacetic acid (DTPA), DOTA, NOTA, NOGADA, NETA, deferoxamine (DfO), porphyrins, polyamines, crown ethers, bis-thiosemicarbazones, polyoximes, and like groups. The chelate can be linked to the antigen binding construct by a group which allows formation of a bond to the molecule with minimal loss of immunoreactivity and minimal aggregation and/or internal cross-linking. The same chelates, when complexed with non-radioactive metals, such as manganese, iron and gadolinium are useful for MRI, when used along with the antigen binding constructs and carriers described herein. Macrocyclic chelates such as NOTA, NOGADA, DOTA, and TETA are of use with a variety of metals and radiometals including, but not limited to, radionuclides of gallium, yttrium and copper, respectively. Other ring-type chelates such as macrocyclic polyethers, which are of interest for stably binding radionuclides, such as Radium-223 for RAIT may be used. In certain embodiments, chelating moieties may be used to attach a PET imaging agent, such as an Aluminum-¹⁸F complex, to a targeting molecule for use in PET analysis.

[0357] Exemplary contrast agents that can be used as detectable moieties in accordance with the embodiments of the disclosure include, but are not limited to, barium, diatrizoate, ethiodized oil, gallium citrate, iocarmic acid, iocetamic acid, iodamide, iodipamide, iodoxamic acid, iogulamide, iohexyl, iopamidol, iopanoic acid, ioprocemic acid, iosefamic acid, ioseric acid, iosulamide meglumine, iosemetic acid, iotasul, iotetric acid, iothalamic acid, iotroxic acid, ioxaglic acid, ioxotrizoic acid, ipodate, meglumine, metrizamide, metrizoate, propyliodone, thallous chloride, or combinations thereof.

[0358] Bioluminescent and fluorescent compounds or molecules and dyes that can be used as detectable moieties in accordance with the embodiments of the disclosure include, but are not limited to, fluorescein, fluorescein isothiocyanate (FITC), OREGON GREEN™, rhodamine, Texas red, tetrarhodimine isothiocynate (TRITC), Cy3, Cy5, and the like), fluorescent markers (e.g., green fluorescent protein (GFP), phycoerythrin, and the like), autoquenched fluorescent compounds that are activated by tumor-associated proteases, enzymes (e.g., luciferase, horseradish peroxidase, alkaline phosphatase, and the like), nanoparticles, biotin, digoxigenin or combinations thereof.

[0359] Enzymes that can be used as detectable moieties in accordance with the embodiments of the disclosure include, but are not limited to, horseradish peroxidase, alkaline phosphatase, acid phosphatase, glucose oxidase, β-galactosidase, β-glucoronidase or β-lactamase. Such enzymes may be used in combination with a chromogen, a fluorogenic compound or a luminogenic compound to generate a detectable signal.

[0360] In some embodiments, the payload is a nanoparticle. The term “nanoparticle” refers to a microscopic particle whose size is measured in nanometers, e.g., a particle with at least one dimension less than about 100 nm. Nanoparticles can be used as detectable substances because they are small enough to scatter visible light rather than absorb it. For example, gold nanoparticles possess significant visible light extinction properties and appear deep red to black in solution. As a result, compositions comprising antigen binding constructs conjugated to nanoparticles can be used for the in vivo imaging of T-cells in a subject. At the small end of the size range, nanoparticles are often referred to as clusters. Metal, dielectric, and semiconductor nanoparticles have been formed, as well as hybrid structures (e.g. core-shell nanoparticles). Nanospheres, nanorods, and nanocups are just a few of the shapes that have been grown. Semiconductor quantum dots and nanocrystals are examples of additional types of nanoparticles. Such nanoscale particles can be used as payloads to be conjugated to any one of the anti-Gal3 antibodies disclosed herein.

[0361] In some embodiments, the payload comprises an immunomodulatory agent. Useful immunomodulatory agents include anti-hormones that block hormone action on tumors and immunosuppressive agents that suppress cytokine production, down-regulate self-antigen expression, or mask MHC antigens. Representative anti-hormones include anti-estrogens including, for example, tamoxifen, raloxifene, aromatase inhibiting 4(5)-imidazoles, 4-hydroxytamoxifen, trioxifene, keoxifene, LY 117018, onapnstone, and toremifene; and antiandrogens such as flutamide, nilutamide, bicalutamide, leuprolide, and goserelin; and anti-adrenal agents. Illustrative immunosuppressive agents include, but are not limited to 2-amino-6-aryl-5-substituted pyrimidines, azathioprine, cyclophosphamide, bromocryptine, danazol, dapsone, glutaraldehyde, anti-idiotypic antibodies for MHC antigens and MHC fragments, cyclosporin A, steroids such as glucocorticosteroids, streptokinase, or rapamycin.

[0362] In some embodiments, the payload comprises an immune modulator. Exemplary immune modulators include, but are not limited to, gancyclovier, etanercept, tacrolimus, sirolimus, voclosporin, cyclosporine, rapamycin, cyclophosphamide, azathioprine, mycophenolgate mofetil, methotrextrate, glucocorticoid and its analogs, xanthines, stem cell growth factors, lymphotoxins, hematopoietic factors, tumor necrosis factor (TNF) (e.g., TNF-α), interleukins (e.g., interleukin-1 (IL-1), IL-2, IL-3, IL-6, IL-10, IL-12, IL-18, and IL-21), colony stimulating factors (e.g., granulocyte-colony stimulating factor (G-CSF) and granulocyte macrophage-colony stimulating factor (GM-CSF)), interferons (e.g., interferons-alpha, interferon-beta, interferon-gamma), the stem cell growth factor designated “S1 factor,” erythropoietin and thrombopoietin, or a combination thereof.

[0363] In some embodiments, the payload comprises an immunotoxin. Immunotoxins include, but are not limited to, ricin, radionuclides, pokeweed antiviral protein, Pseudomonas exotoxin A, diphtheria toxin, ricin A chain, fungal toxins such as restrictocin and phospholipase enzymes. See, generally, “Chimeric Toxins,” Olsnes and Pihl, Pharmac. Ther. 15:355-381 (1981); and “Monoclonal Antibodies for Cancer Detection and Therapy,” eds. Baldwin and Byers, pp. 159-179, 224-266, Academic Press (1985).

[0364] In some instances, the payload comprises a nucleic acid polymer. In such instances, the nucleic acid polymer comprises short interfering nucleic acid (siNA), short interfering RNA (siRNA), double-stranded RNA (dsRNA), micro-RNA (miRNA), short hairpin RNA (shRNA), an antisense oligonucleotide. In other instances, the nucleic acid polymer comprises an mRNA, encoding, e.g., a cytotoxic protein or peptide or an apoptotic triggering protein or peptide. Exemplary cytotoxic proteins or peptides include a bacterial cytotoxin such as an alpha-pore forming toxin (e.g., cytolysin A from E. coli), a beta-pore-forming toxin (e.g., α-Hemolysin, PVL—panton Valentine leukocidin, aerolysin, clostridial Epsilon-toxin, clostridium perfringens enterotoxin), binary toxins (anthrax toxin, edema toxin, C. botulinum C2 toxin, C spirofome toxin, C. perfringens iota toxin, C. difficile cytolethal toxins (A and B)), prion, parasporin, a cholesterol-dependent cytolysins (e.g., pneumolysin), a small pore-forming toxin (e.g., Gramicidin A), a cyanotoxin (e.g., microcystins, nodularins), a hemotoxin, a neurotoxin (e.g., botulinum neurotoxin), a cytotoxin, cholera toxin, diphtheria toxin, Pseudomonas exotoxin A, tetanus toxin, or an immunotoxin (idarubicin, ricin A, CRM9, Pokeweed antiviral protein, DT). Exemplary apoptotic triggering proteins or peptides include apoptotic protease activating factor-1 (Apaf-1), cytochrome-c, caspase initiator proteins (CASP2, CASP8, CASP9, CASP10), apoptosis inducing factor (AIF), p53, p73, p63, Bcl-2, Bax, granzyme B, poly-ADP ribose polymerase (PARP), and P 21-activated kinase 2 (PAK2). In additional instances, the nucleic acid polymer comprises a nucleic acid decoy. In some instances, the nucleic acid decoy is a mimic of protein-binding nucleic acids such as RNA-based protein-binding mimics. Exemplary nucleic acid decoys include transactivating region (TAR) decoy and Rev response element (RRE) decoy.

[0365] In some cases, the payload is an aptamer. Aptamers are small oligonucleotide or peptide molecules that bind to specific target molecules. Exemplary nucleic acid aptamers include DNA aptamers, RNA aptamers, or XNA aptamers which are RNA and/or DNA aptamers comprising one or more unnatural nucleotides. Exemplary nucleic acid aptamers include ARC19499 (Archemix Corp.), REG1 (Regado Biosciences), and ARC1905 (Ophthotech).

[0366] Nucleic acids in accordance with the embodiments described herein optionally include naturally occurring nucleic acids, or one or more nucleotide analogs or have a structure that otherwise differs from that of a naturally occurring nucleic acid. For example, 2′-modifications include halo, alkoxy, and allyloxy groups. In some embodiments, the 2′-OH group is replaced by a group selected from H, OR, R, halo, SH, SR, NH₂, NHR, NR₂ or CN, wherein R is C₁-C₆ alkyl, alkenyl, or alkynyl, and halo is F, Cl, Br, or I. Examples of modified linkages include phosphorothioate and 5′-N-phosphoramidite linkages.

[0367] Nucleic acids having a variety of different nucleotide analogs, modified backbones, or non-naturally occurring internucleoside linkages are utilized in accordance with the embodiments described herein. In some cases, nucleic acids include natural nucleosides (i.e., adenosine, thymidine, guanosine, cytidine, uridine, deoxyadenosine, deoxythymidine, deoxyguanosine, and deoxycytidine) or modified nucleosides. Examples of modified nucleotides include base modified nucleoside (e.g., aracytidine, inosine, isoguanosine, nebularine, pseudouridine, 2,6-diaminopurine, 2-aminopurine, 2-thiothymidine, 3-deaza-5-azacytidine, 2′-deoxyuridine, 3-nitorpyrrole, 4-methylindole, 4-thiouridine, 4-thiothymidine, 2-aminoadenosine, 2-thiothymidine, 2-thiouridine, 5-bromocytidine, 5-iodouridine, inosine, 6-azauridine, 6-chloropurine, 7-deazaadenosine, 7-deazaguanosine, 8-azaadenosine, 8-azidoadenosine, benzimidazole, M1-methyladenosine, pyrrolo-pyrimidine, 2-amino-6-chloropurine, 3-methyl adenosine, 5-propynylcytidine, 5-propynyluridine, 5-bromouridine, 5-fluorouridine, 5-methylcytidine, 7-deazaadenosine, 7-deazaguanosine, 8-oxoadenosine, 8-oxoguanosine, O(6)-methylguanine, and 2-thiocytidine), chemically or biologically modified bases (e.g., methylated bases), modified sugars (e.g., 2′-fluororibose, 2′-aminoribose, 2′-azidoribose, 2′-O-methylribose, L-enantiomeric nucleosides arabinose, and hexose), modified phosphate groups (e.g., phosphorothioates and 5′-N-phosphoramidite linkages), and combinations thereof. Natural and modified nucleotide monomers for the chemical synthesis of nucleic acids are readily available. In some cases, nucleic acids comprising such modifications display enhanced properties relative to nucleic acids consisting only of naturally occurring nucleotides. In some embodiments, nucleic acid modifications described herein are utilized to reduce and/or prevent digestion by nucleases (e.g. exonucleases, endonucleases, etc.). For example, the structure of a nucleic acid may be stabilized by including nucleotide analogs at the 3′ end of one or both strands order to reduce digestion.

[0368] Different nucleotide modifications and/or backbone structures may exist at various positions in the nucleic acid. Such modifications include morpholinos, peptide nucleic acids (PNAs), methylphosphonate nucleotides, thiolphosphonate nucleotides, 2′-fluoro N3-P5′-phosphoramidites, 1′, 5′- anhydrohexitol nucleic acids (HNAs), or a combination thereof.

[0369] Any of the anti-Gal3 antibodies disclosed herein may be conjugated to one or more (e.g. 1, 2, 3, 4, 5, 6, 7, 8, 9, or 10, or more) payloads described herein.

### Conjugation Chemistry

[0370] In some instances, the payload is conjugated to an anti-Gal3 antibody described herein by a native ligation. In some instances, the conjugation is as described in: Dawson, et al. “Synthesis of proteins by native chemical ligation,” Science 1994, 266, 776-779; Dawson, et al. “Modulation of Reactivity in Native Chemical Ligation through the Use of Thiol Additives,” J. Am. Chem. Soc. 1997, 119, 4325-4329; Hackeng, et al. “Protein synthesis by native chemical ligation: Expanded scope by using straightforward methodology.,” Proc. Natl. Acad. Sci. USA 1999, 96, 10068-10073; or Wu, et al. “Building complex glycopeptides: Development of a cysteine-free native chemical ligation protocol,” Angew. Chem. Int. Ed. 2006, 45, 4116-4125. In some instances, the conjugation is as described in U.S. Pat. No. 8,936,910.

[0371] In some instances, the payload is conjugated to an anti-Gal3 antibody described herein by a site-directed method utilizing a “traceless” coupling technology (Philochem). In some instances, the “traceless” coupling technology utilizes an N-terminal 1,2-aminothiol group on the binding moiety which is then conjugated with a polynucleic acid molecule containing an aldehyde group.

[0372] In some instances, the payload is conjugated to an anti-Gal3 antibody described herein by a site-directed method utilizing an unnatural amino acid incorporated into the binding moiety. In some instances, the unnatural amino acid comprises p-acetylphenylalanine (pAcPhe). In some instances, the keto group of pAcPhe is selectively coupled to an alkoxy-amine derivatived conjugating moiety to form an oxime bond.

[0373] In some instances, the payload is conjugated to an anti-Gal3 antibody described herein by a site-directed method utilizing an enzyme-catalyzed process. In some instances, the site-directed method utilizes SMARTag™ technology (Redwood). In some instances, the SMARTag™ technology comprises generation of a formylglycine (FGly) residue from cysteine by formylglycine-generating enzyme (FGE) through an oxidation process under the presence of an aldehyde tag and the subsequent conjugation of FGly to an alkylhydraine-functionalized polynucleic acid molecule via hydrazino-Pictet-Spengler (HIPS) ligation.

[0374] In some instances, the enzyme-catalyzed process comprises microbial transglutaminase (mTG). In some cases, the payload is conjugated to the anti-Gal3 antibody utilizing a microbial transglutaminze catalyzed process. In some instances, mTG catalyzes the formation of a covalent bond between the amide side chain of a glutamine within the recognition sequence and a primary amine of a functionalized polynucleic acid molecule. In some instances, mTG is produced from Streptomyces mobarensis.

[0375] In some instances, the payload is conjugated to an anti-Gal3 antibody by a method as described in PCT Publication No. WO2014/140317, which utilizes a sequence-specific transpeptidase and is hereby expressly incorporated by reference in its entirety.

[0376] In some instances, the payload is conjugated to an anti-Gal3 antibody described herein by a method as described in U.S. Pat. Publication Nos. 2015/0105539 and 2015/0105540.

### Linker

[0377] In some instances, a linker described herein comprises a natural or synthetic polymer, consisting of long chains of branched or unbranched monomers, and/or cross-linked network of monomers in two or three dimensions. In some instances, the linker includes a polysaccharide, lignin, rubber, or polyalkylene oxide (e.g., polyethylene glycol).

[0378] In some instances, the linker includes, but is not limited to, alpha-, omega-dihydroxylpolyethyleneglycol, biodegradable lactone-based polymer, e.g. polyacrylic acid, polylactide acid (PLA), poly(glycolic acid) (PGA), polypropylene, polystyrene, polyolefin, polyamide, polycyanoacrylate, polyimide, polyethylenterephthalat (PET, PETG), polyethylene terephthalate (PETE), polytetramethylene glycol (PTG), or polyurethane as well as mixtures thereof. As used herein, a mixture refers to the use of different polymers within the same compound as well as in reference to block copolymers. In some cases, block copolymers are polymers wherein at least one section of a polymer is built up from monomers of another polymer. In some instances, the linker comprises polyalkylene oxide. In some instances, the linker comprises PEG. In some instances, the linker comprises polyethylene imide (PEI) or hydroxy ethyl starch (HES).

[0379] In some cases, the polyalkylene oxide (e.g., PEG) is a polydispers or monodispers compound. In some instances, polydispers material comprises disperse distribution of different molecular weight of the material, characterized by mean weight (weight average) size and dispersity. In some instances, the monodisperse PEG comprises one size of molecules. In some embodiments, the linker is poly- or monodispersed polyalkylene oxide (e.g., PEG) and the indicated molecular weight represents an average of the molecular weight of the polyalkylene oxide, e.g., PEG, molecules.

[0380] In some embodiments, the linker comprises a polyalkylene oxide (e.g., PEG) and the molecular weight of the polyalkylene oxide (e.g., PEG) is about 200, 300, 400, 500, 600, 700, 800, 900, 1000, 1100, 1200, 1300, 1400, 1450, 1500, 1600, 1700, 1800, 1900, 2000, 2100, 2200, 2300, 2400, 2500, 2600, 2700, 2800, 2900, 3000, 3250, 3350, 3500, 3750, 4000, 4250, 4500, 4600, 4750, 5000, 5500, 6000, 6500, 7000, 7500, 8000, 10,000, 12,000, 20,000, 35,000, 40,000, 50,000, 60,000, or 100,000 Da.

[0381] In some embodiments, the polyalkylene oxide (e.g., PEG) is a discrete PEG, in which the discrete PEG is a polymeric PEG comprising more than one repeating ethylene oxide units. In some instances, a discrete PEG (dPEG) comprises from 2 to 60, from 2 to 50, or from 2 to 48 repeating ethylene oxide units. In some instances, a dPEG comprises about 2, 3, 4, 5, 6, 7, 8, 9, 10, 11, 12, 13, 14, 15, 16, 17, 18, 19, 20, 22, 24, 26, 28, 30, 35, 40, 42, 48, 50 or more repeating ethylene oxide units. In some instances, a dPEG comprises about 2 or more repeating ethylene oxide units. In some cases, a dPEG is synthesized as a single molecular weight compound from pure (e.g., about 95%, 98%, 99%, or 99.5%) staring material in a stepwise fashion. In some cases, a dPEG has a specific molecular weight, rather than an average molecular weight.

[0382] In some instances, the linker is a discrete PEG, optionally comprising from 2 to 60, from 2 to 50, or from 2 to 48 repeating ethylene oxide units. In some cases, the linker comprises a dPEG comprising about 2, 3, 4, 5, 6, 7, 8, 9, 10, 11, 12, 13, 14, 15, 16, 17, 18, 19, 20, 22, 24, 26, 28, 30, 35, 40, 42, 48, 50 or more repeating ethylene oxide units.

[0383] In some embodiments, the linker is a polypeptide linker. In some instances, the polypeptide linker comprises at least 2, 3, 4, 5, 6, 7, 8, 10, 15, 20, 25, 30, 35, 40, 45, 50, 60, 70, 80, 90, 100, or more amino acid residues. In some instances, the polypeptide linker comprises at least 2, 3, 4, 5, 6, 7, 8, or more amino acid residues. In some instances, the polypeptide linker comprises at most 2, 3, 4, 5, 6, 7, 8, or less amino acid residues. In some cases, the polypeptide linker is a cleavable polypeptide linker (e.g., either enzymatically or chemically). In some cases, the polypeptide linker is a non-cleavable polypeptide linker. In some instances, the polypeptide linker comprises Val-Cit (valine-citrulline), Gly-Gly-Phe-Gly, Phe-Lys, Val-Lys, Gly-Phe-Lys, Phe-Phe-Lys, Ala-Lys, Val-Arg, Phe-Cit, Phe-Arg, Leu-Cit, Ile-Cit, Trp-Cit, Phe-Ala, Ala-Leu-Ala-Leu, or Gly-Phe-Leu-Gly. In some instances, the polypeptide linker comprises a peptide such as: Val-Cit (valine-citrulline), Gly-Gly-Phe-Gly, Phe-Lys, Val-Lys, Gly-Phe-Lys, Phe-Phe-Lys, Ala-Lys, Val-Arg, Phe-Cit, Phe-Arg, Leu-Cit, Ile-Cit, Trp-Cit, Phe-Ala, Ala-Leu-Ala-Leu, or Gly-Phe-Leu-Gly. In some cases, the polypeptide linker comprises L-amino acids, D-amino acids, or a mixture of both L- and D-amino acids.

[0384] In some instances, the linker comprises a homobifunctional linker. Exemplary homobifunctional linkers include, but are not limited to, Lomant’s reagent dithiobis (succinimidylpropionate) DSP, 3′3′-dithiobis(sulfosuccinimidyl proprionate (DTSSP), disuccinimidyl suberate (DSS), bis(sulfosuccinimidyl)suberate (BS), disuccinimidyl tartrate (DST), disulfosuccinimidyl tartrate (sulfo DST), ethylene glycobis(succinimidylsuccinate) (EGS), disuccinimidyl glutarate (DSG), N,N′-disuccinimidyl carbonate (DSC), dimethyl adipimidate (DMA), dimethyl pimelimidate (DMP), dimethyl suberimidate (DMS), dimethyl-3,3′-dithiobispropionimidate (DTBP), 1,4-di-3′-(2′-pyridyldithio)propionamido)butane (DPDPB), bismaleimidohexane (BMH), aryl halide-containing compound (DFDNB), such as e.g. 1,5-difluoro-2,4-dinitrobenzene or 1,3-difluoro-4,6-dinitrobenzene, 4,4′-difluoro-3,3′-dinitrophenylsulfone (DFDNPS), bis-[β-(4-azidosalicylamido)ethyl]disulfide (BASED), formaldehyde, glutaraldehyde, 1,4-butanediol diglycidyl ether, adipic acid dihydrazide, carbohydrazide, o-toluidine, 3,3′-dimethylbenzidine, benzidine, α,α′-p-diaminodiphenyl, diiodo-p-xylene sulfonic acid, N,N′-ethylene-bis(iodoacetamide), or N,N′-hexamethylene-bis(iodoacetamide).

[0385] In some embodiments, the linker comprises a heterobifunctional linker. Exemplary heterobifunctional linker include, but are not limited to, amine-reactive and sulfhydryl cross-linkers such as N-succinimidyl 3-(2-pyridyldithio)propionate (sPDP), long-chain N-succinimidyl 3-(2-pyridyldithio)propionate (LC-sPDP), water-soluble-long-chain N-succinimidyl 3-(2-pyridyldithio) propionate (sulfo-LC-sPDP), succinimidyloxycarbonyl-α-methyl-α-(2-pyridyldithio)toluene (sMPT), sulfosuccinimidyl-6-[α-methyl-α-(2-pyridyldithio)toluamido]hexanoate (sulfo-LC-sMPT), succinimidyl-4-(N-maleimidomethyl)cyclohexane-1-carboxylate (sMCC), sulfosuccinimidyl-4-(N-maleimidomethyl)cyclohexane-1-carboxylate (sulfo-sMCC), m-maleimidobenzoyl-N-hydroxysuccinimide ester (MBs), m-maleimidobenzoyl-N-hydroxysulfosuccinimide ester (sulfo-MBs), N-succinimidyl(4-iodoacteyl)aminobenzoate (sIAB), sulfosuccinimidyl(4-iodoacteyl)aminobenzoate (sulfo-sIAB), succinimidyl-4-(p-maleimidophenyl)butyrate (sMPB), sulfosuccinimidyl-4-(p-maleimidophenyl)butyrate (sulfo-sMPB), N-(γ-maleimidobutyryloxy)succinimide ester (GMBs), N-(γ-maleimidobutyryloxy)sulfosuccinimide ester (sulfo-GMBs), succinimidyl 6-((iodoacetyl)amino)hexanoate (sIAX), succinimidyl 6-[6-(((iodoacetyl)amino)hexanoyl)amino]hexanoate (sIAXX), succinimidyl 4-(((iodoacetyl)amino)methyl)cyclohexane-1-carboxylate (sIAC), succinimidyl 6-((((4-iodoacetyl)amino)methyl)cyclohexane-1-carbonyl)amino) hexanoate (sIACX), p-nitrophenyl iodoacetate (NPIA), carbonyl-reactive and sulfhydryl-reactive cross-linkers such as 4-(4-N-maleimidophenyl)butyric acid hydrazide (MPBH), 4-(N-maleimidomethyl)cyclohexane-1-carboxyl-hydrazide-8 (M₂C₂H), 3-(2-pyridyldithio)propionyl hydrazide (PDPH), amine-reactive and photoreactive cross-linkers such as N-hydroxysuccinimidyl-4-azidosalicylic acid (NHs-AsA), N-hydroxysulfosuccinimidyl-4-azidosalicylic acid (sulfo-NHs-AsA), sulfosuccinimidyl-(4-azidosalicylamido)hexanoate (sulfo-NHs-LC-AsA), sulfosuccinimidyl-2-(p-azidosalicylamido)ethyl-1,3′-dithiopropionate (sAsD), N-hydroxysuccinimidyl-4-azidobenzoate (HsAB), N-hydroxysulfosuccinimidyl-4-azidobenzoate (sulfo-HsAB), N-succinimidyl-6-(4′-azido-2′-nitrophenylamino)hexanoate (sANPAH), sulfosuccinimidyl-6-(4′-azido-2′-nitrophenylamino)hexanoate (sulfo-sANPAH), N-5-azido-2-nitrobenzoyloxysuccinimide (ANB-NOs), sulfosuccinimidyl-2-(m-azido-o-nitrobenzamido)-ethyl-1,3′-dithiopropionate (sAND), N-succinimidyl-4(4-azidophenyl)1,3′-dithiopropionate (sADP), N-sulfosuccinimidyl(4-azidophenyl)-1,3′-dithiopropionate (sulfo-sADP), sulfosuccinimidyl 4-(ρ-azidophenyl)butyrate (sulfo-sAPB), sulfosuccinimidyl 2-(7-azido-4-methylcoumarin-3-acetamide)ethyl-1,3′-dithiopropionate (sAED), sulfosuccinimidyl 7-azido-4-methylcoumain-3-acetate (sulfo-sAMCA), ρ-nitrophenyl diazopyruvate (ρNPDP), ρ-nitrophenyl-2-diazo-3,3,3-trifluoropropionate (PNP-DTP), sulfhydryl-reactive and photoreactive cross-linkers such as1-(ρ-Azidosalicylamido)-4-(iodoacetamido)butane (AsIB), N-[4-(p-azidosalicylamido)butyl]-3′-(2′-pyridyldithio)propionamide (APDP), benzophenone-4-iodoacetamide, benzophenone-4-maleimide carbonyl-reactive and photoreactive cross-linkers such as ρ-azidobenzoyl hydrazide (ABH), carboxylate-reactive and photoreactive cross-linkers such as 4-(ρ-azidosalicylamido)butylamine (AsBA), and arginine-reactive and photoreactive cross-linkers such as ρ-azidophenyl glyoxal (APG).

[0386] In some embodiments, the linker comprises a benzoic acid group, or its derivatives thereof. In some instances, the benzoic acid group or its derivatives thereof comprise paraaminobenzoic acid (PABA). In some instances, the benzoic acid group or its derivatives thereof comprise gamma-aminobutyric acid (GABA).

[0387] In some embodiments, the linker comprises one or more of a maleimide group, a peptide moiety, and/or a benzoic acid group, in any combination. In some embodiments, the linker comprises a combination of a maleimide group, a peptide moiety, and/or a benzoic acid group. In some instances, the maleimide group is maleimidocaproyl (mc). In some instances, the peptide group is val-cit. In some instances, the benzoic acid group is PABA. In some instances, the linker comprises a mc-val-cit group. In some cases, the linker comprises a val-cit-PABA group. In additional cases, the linker comprises a mc-val-cit-PABA group.

[0388] In some embodiments, the linker is a self-immolative linker or a self-elimination linker. In some cases, the linker is a self-immolative linker. In other cases, the linker is a self-elimination linker (e.g., a cyclization self-elimination linker). In some instances, the linker comprises a linker described in U.S. Pat. No. 9,089,614 or PCT Publication No. WO 2015/038426, each of which is hereby expressly incorporated by reference in its entirety.

[0389] In some embodiments, the linker is a dendritic type linker. In some instances, the dendritic type linker comprises a branching, multifunctional linker moiety. In some instances, the dendritic type linker comprises PAMAM dendrimers.

[0390] In some embodiments, the linker is a traceless linker or a linker in which after cleavage does not leave behind a linker moiety (e.g., an atom or a linker group) to the antibody or payload. Exemplary traceless linkers include, but are not limited to, germanium linkers, silicium linkers, sulfur linkers, selenium linkers, nitrogen linkers, phosphorus linkers, boron linkers, chromium linkers, or phenylhydrazide linker. In some cases, the linker is a traceless aryl-triazene linker as described in Hejesen, et al., “A traceless aryl-triazene linker for DNA-directed chemistry,” Org Biomol Chem 11(15): 2493-2497 (2013). In some instances, the linker is a traceless linker described in Blaney, et al., “Traceless solid-phase organic synthesis,” Chem. Rev. 102: 2607-2024 (2002). In some instances, a linker is a traceless linker as described in U.S. Pat. No. 6,821,783.

### Kit/Article of Manufacture

[0391] Disclosed herein, in certain embodiments, are kits and articles of manufacture for use with one or more of the compositions and methods described herein. Such kits include a carrier, package, or container that is compartmentalized to receive one or more containers such as vials, tubes, and the like, each of the container(s) comprising one of the separate elements to be used in a method described herein. Suitable containers include, for example, bottles, vials, syringes, and test tubes. In one embodiment, the containers are formed from a variety of materials such as glass or plastic.

[0392] The articles of manufacture provided herein contain packaging materials. Examples of pharmaceutical packaging materials include, but are not limited to, blister packs, bottles, tubes, bags, containers, bottles, and any packaging material suitable for a selected formulation and intended mode of administration and treatment.

[0393] For example, the container(s) include an anti-Gal3 antibody as disclosed herein, host cells for producing one or more antibodies described herein, and/or vectors comprising nucleic acid molecules that encode the antibodies described herein. Such kits optionally include an identifying description or label or instructions relating to its use in the methods described herein.

[0394] A kit typically includes labels listing contents and/or instructions for use, and package inserts with instructions for use. A set of instructions will also typically be included.

[0395] In one embodiment, a label is on or associated with the container. In one embodiment, a label is on a container when letters, numbers or other characters forming the label are attached, molded or etched into the container itself; a label is associated with a container when it is present within a receptacle or carrier that also holds the container, e.g., as a package insert. In one embodiment, a label is used to indicate that the contents are to be used for a specific therapeutic application. The label also indicates directions for use of the contents, such as in the methods described herein.

[0396] In certain embodiments, the pharmaceutical compositions are presented in a pack or dispenser device which contains one or more unit dosage forms containing a compound provided herein. The pack, for example, contains metal or plastic foil, such as a blister pack. In one embodiment, the pack or dispenser device is accompanied by instructions for administration. In one embodiment, the pack or dispenser is also accompanied with a notice associated with the container in form prescribed by a governmental agency regulating the manufacture, use, or sale of pharmaceuticals, which notice is reflective of approval by the agency of the form of the drug for human or veterinary administration. Such notice, for example, is the labeling approved by the U.S. Food and Drug Administration for prescription drugs, or the approved product insert. In one embodiment, compositions containing a compound provided herein formulated in a compatible pharmaceutical carrier are also prepared, placed in an appropriate container, and labeled for treatment of an indicated condition.

### Numbered Arrangements 1

[0397] Some embodiments provided herein are described by way of the following provided numbered arrangements and also provided as possible combinations or overlapping embodiments:

[0398] 1. A method for inhibiting, reducing, preventing, and/or treating stroke in a subject in need thereof, comprising administering an anti-Gal3 antibody or binding fragment thereof to the subject, thereby inhibiting, reducing, preventing, and/or treating the stroke.

[0399] 2. The method of arrangement 1, further comprising selecting the subject as having the stroke or at risk of contracting the stroke prior to the administering step.

[0400] 3. The method of arrangement 2, wherein selecting the subject as having the stroke or at risk of contracting the stroke comprises assessing the subject according to the National Institutes of Health Stroke Scale (NIHSS), modified Rankin Scale (mRS), Fugl-Meyer Assessment (FMA), Montreal Cognitive Assessment (MoCA), neuroimaging, optionally CT or MRI, and/or detecting stroke biomarkers, optionally S100 calcium binding protein B (S100B), glial fibrillary acidic protein (GFAP), neuron-specific enolase (NSE), and/or matrix metalloproteinase-9 (MMP9).

[0401] 4. The method of any one of arrangements 1-3, further comprising detecting an amelioration of symptoms associated with the stroke after the administering step.

[0402] 5. The method of arrangement 4, wherein detecting an amelioration of symptoms associated with the stroke after the administering step comprises detecting an improvement by the subject according to the NIHSS, mRS, FMA, or MoCA.

[0403] 6. The method of arrangement 5, wherein:
[0404] a) the improvement by the subject according to the NIHSS comprises at least a 4 point decrease on the NIHSS;
[0405] b) the improvement by the subject according to the mRS comprises at least a 1 point decrease on the mRS;
[0406] c) the improvement by the subject according to the FMA comprises at least a 1 point increase on the FMA; and/or
[0407] d) the improvement by the subject according to the MoCA comprises at least a 1 point increase on the MoCA;
[0408] after the administering step, optionally as assessed 7, 35, and/or 75 days after the administering step.

[0409] 7. The method of any one of arrangements 1-6, wherein the stroke is an ischemic stroke, thrombotic stroke, embolic stroke, transient ischemic attack, hemorrhagic stroke, intracerebral hemorrhage, or subarachnoid hemorrhage.

[0410] 8. The method of any one of arrangements 1-7, wherein the stroke is intracerebral hemorrhage (ICH), optionally wherein the ICH is associated with deposition of amyloid aggregates and/or cerebral amyloid angiopathy (CAA).

[0411] 9. The method of any one of arrangements 1-8, wherein administration of the anti-Gal3 antibody or binding fragment thereof to the subject prevents the stroke.

[0412] 10. The method of any one of arrangements 1-9, wherein administration of the anti-Gal3 antibody or binding fragment thereof prevents loss of locomotor dysfunction, prevents incidence of microhemorrhage, prevents elevation of levels of activated microglia, prevents elevation of levels of activated astrocytes, prevents elevation of circulating proinflammatory immune cells, prevents elevation of circulating proinflammatory cytokines, or any combination thereof, in the subject.

[0413] 11. The method of any one of arrangements 1-10, wherein administration of the anti-Gal3 antibody or binding fragment thereof to the subject treats the stroke.

[0414] 12. The method of any one of arrangements 1-11, wherein administration of the anti-Gal3 antibody or binding fragment thereof reduces locomotor dysfunction, reduces microhemorrhage, reduces levels of activated microglia, reduces levels of activated astrocytes, reduces levels of circulating proinflammatory immune cells, reduces levels of circulating proinflammatory cytokines, or any combination thereof, in the subject.

[0415] 13. The method of arrangement 12, wherein the reduction in locomotor dysfunction, reduction in microhemorrhage, reduction in levels of activated microglia, reduction in levels of activated astrocytes, reduction in levels of circulating proinflammatory cytokines, or any combination thereof, in the subject, is by at least 5%, 10%, 20%, 30%, 40%, 50%, 60%, 70%, 80%, 90%, or 95%, or any percentage within a range defined by any two of the aforementioned reductions.

[0416] 14. The method of arrangements 12 or 13, wherein the reduction in locomotor dysfunction in the subject is by at least 50%.

[0417] 15. The method of any one of arrangements 12-14, wherein the reduction in locomotor dysfunction is assessed by the Fugl-Meyer Assessment (FMA), Motor Assessment Scale (MAS), and/or the Chedoke-McMaster Stroke Assessment (CMSA).

[0418] 16. The method of any one of arrangements 12-15, wherein the reduction in microhemorrhage in the subject is by at least 50%.

[0419] 17. The method of any one of arrangements 12-16, wherein the reduction in microhemorrhage is assessed by neuroimaging, MRI, and/or Prussian blue staining.

[0420] 18. The method of any one of arrangements 12-17, wherein the reduction in levels of activated microglia in the subject is by at least 20%.

[0421] 19. The method of any one of arrangements 12-18, wherein the reduction in levels of activated microglia is assessed by detection of microglia activation markers, optionally ionized calcium-binding adaptor molecule 1 (Iba1), monocyte chemoattractant protein-1 (MCP-1), chitinase-3-like protein 1 (YKL-40), and/or soluble CD14 (sCD14), optionally from the cerebrospinal fluid of the subject.

[0422] 20. The method of any one of arrangements 12-19, wherein the reduction in levels of activated astrocytes in the subject is by at least 30%.

[0423] 21. The method of any one of arrangements 12-20, wherein the reduction in levels of activated astrocytes is assessed by detection of astrocyte activation markers, optionally GFAP and/or S100B, optionally from the cerebrospinal fluid of the subject.

[0424] 22. The method of any one of arrangements 12-21, wherein the proinflammatory immune cells comprise NK cells, monocytes, and/or lymphocytes.

[0425] 23. The method of any one of arrangements 12-22, wherein the proinflammatory cytokines comprise IL-6, TNF-α, and/or IL1β.

[0426] 24. The method of any one of arrangements 1-23, wherein administering an anti-Gal3 antibody or binding fragment thereof to the subject comprises administration of one or more unit doses of the anti-Gal3 antibody or binding fragment thereof, optionally 1, 2, 3, 4, 5, 6, 7, 8, 9, or 10 unit doses.

[0427] 25. The method of arrangement 24, wherein the one or more unit doses comprise 50, 60, 70, 80, 90, 100, 200, 300, 400, 500, 600, 700, 800, 900, 1000, 1100, 1200, 1300, 1400, 1500, 1600, 1700, 1800, 1900, 2000, 2500, 3000, 3500, 4000, 4500 or 5000 mg of the anti-Gal3 antibody or binding fragment thereof per unit dose, or any amount per unit dose within a range defined by any two of the aforementioned amounts per unit dose.

[0428] 26. The method of arrangements 24 or 25, wherein the one or more unit doses comprise 1, 1.1, 1.2, 1.3, 1.4, 1.5, 1.6, 1.7, 1.8, 1.9, 2, 3, 4, 5, 6, 7, 8, 9, 10, 15, 20, 25, 30, 35, 40, 45, 50, 55, 60, 65, 70, 75, 80, 85, 90, 95, 100, 105, 110, 115, 120, 125, 130, 135, 140, 145, or 150 mg/kg weight of the subject, or any amount per unit dose within a range defined by any two of the aforementioned amounts per unit dose.

[0429] 27. The method of any one of arrangements 24-26, wherein the one or more unit doses are administered every 1, 2, 3, 4, 5, 6, or 7 days, or 1, 2, 3, or 4 weeks, or any interval within a range defined by any two of the aforementioned intervals.

[0430] 28. The method of any one of arrangements 1-27, wherein the anti-Gal3 antibody or binding fragment thereof is administered enterally, orally, intranasally, parenterally, intracranially, subcutaneously, intramuscularly, intradermally, or intravenously, or any combination thereof, optionally intravenously.

[0431] 29. The method of any one of arrangements 1-28, wherein the anti-Gal3 antibody or binding fragment thereof comprises one or more of: TB001, TB006, 12G5.D7, 13A12.2E5, 14H10.2C9, 15F10.2D6, 19B5.2E6, 20D11.2C6, 20H5.A3, 23H9.2E4, 2D10.2B2, 3B11.2G2, 7D8.2D8, mIMT001, 4A11.2B5, 4A11.H1L1, 4A11.H4L2, 4G2.2G6, 6B3.2D3, 6H6.2D6, 9H2.2H10, 13G4.2F8, 13H12.2F8, 15G7.2A7, 19D9.2E5, 23B10.2B12, 24D12.2H9, F846C.1B2, F846C.1F5, F846C.1H12, F846C.1H5, F846C.2H3, F846TC.14A2, F846TC.14E4, F846TC.16B5, F846TC.7F10, F847C.10B9, F847C.11B1, F847C.12F12, F847C.26F5, F847C.4B10, F849C.8D10, F849C.8H3, 846.2B11, 846.4D5, 846T.1H2, 847.14H4, 846.2D4, 846.2F11, 846T.10B1, 846T.2E3, 846T.4C9, 846T.4E11, 846T.4F5, 846T.8D1, 847.10C9, 847.11D6, 847.15D12, 847.15F9, 847.15H11, 847.20H7, 847.21B11, 847.27B9, 847.28D1, 847.2B8, 847.3B3, 849.1D2, 849.2D7, 849.2F12, 849.4B2, 849.4F12, 849.4F2, 849.5C2, 849.8D12, F847C.21H6, 849.5H1, 847.23F11, 847.16D10, 847.13E2-mH0mL1, 847.13E2-mH0mL2, 847.12C4, 847.4D3, 2D10-VH0-VL0, 2D10-hVH4-HVL1, 2D10-hVH4-HVL2, 2D10-hVH4-HVL3, 2D10-hVH4-HVL4, 2D10-hVH3-HVL1, 2D10-hVH3-HVL2, 2D10-hVH3-HVL3, 2D10-hVH3-HVL4, 20H5.A3-VH3VL1, 20H5.A3-VH3VL3, 20H5.A3-VH4VL1, 20H5.A3-VH5VL1, 20H5.A3-VH5VL3, 20H5.A3-VH6VL1, 20H5.A3-VH6VL3, or binding fragment thereof.

[0432] 30. The method of any one of arrangements 1-29, wherein the anti-Gal3 antibody or binding fragment thereof comprises one or more of: TB001, TB006, F846C.1F5, F846TC.16B5, 14H10.2C9, 15G7.2A7, 20H5.A3, 19D9.2E5, 19B5.2E6, or F847C.21H6.

[0433] 31. The method of any one of arrangements 1-30, wherein the anti-Gal3 antibody or binding fragment thereof comprises TB006.

[0434] 32. The method of any one of arrangements 1-31, wherein the anti-Gal3 antibody or binding fragment thereof is administered with one or more additional therapeutic compositions.

[0435] 33. The method of arrangement 32, wherein the stroke is ischemic stroke, thrombotic stroke, embolic stroke, or transient ischemic attack, and the one or more additional therapeutic compositions comprise thrombolytics, tissue plasminogen activator (tPA), alteplase, reteplase, tenecteplase, desmoteplase, anticoagulants, ACE inhibitors, antihypertensives, nicardipine, or any combination thereof.

[0436] 34. The method of arrangement 32, wherein the stroke is hemorrhagic stroke, intracerebral hemorrhage, or subarachnoid hemorrhage, and the one or more additional therapeutic compositions comprise antihypertensives, or nicardipine, or any combination thereof.

[0437] 35. A method for inhibiting, reducing, preventing, and/or treating traumatic brain injury (TBI) in a subject in need thereof, comprising administering an anti-Gal3 antibody or binding fragment thereof to the subject, thereby inhibiting, reducing, preventing, and/or treating the TBI.

[0438] 36. The method of arrangement 35, further comprising selecting the subject as having the TBI or at risk of contracting the TBI prior to the administering step.

[0439] 37. The method of arrangement 36, wherein selecting the subject as having the TBI comprises assessing the subject for level of consciousness, memory loss, and/or the Glasgow Coma Scale, neuroimaging, optionally CT or MRI and/or detecting TBI biomarkers, optionally GFAP and/or ubiquitin carboxy-terminal hydrolase L1 (UCH-L1).

[0440] 38. The method of any one of arrangements 35-37, further comprising detecting an amelioration of symptoms associated with the TBI after the administering step.

[0441] 39. The method of any one of arrangements 35-38, wherein the TBI is associated with a concussion, edema, diffuse axonal injury, spinal cord injury, coma, neuroinflammation, microhemorrhage, astrocytosis, activated microglia, and/or hematoma.

[0442] 40. The method of any one of arrangements 35-39, wherein administration of the anti-Gal3 antibody or binding fragment thereof to the subject prevents the TBI, concussion, edema, diffuse axonal injury, spinal cord injury, coma, neuroinflammation, microhemorrhage, astrocytosis, activated microglia, and/or hematoma.

[0443] 41. The method of any one of arrangements 35-40, wherein administration of the anti-Gal3 antibody or binding fragment thereof prevents elevation of levels of activated microglia, prevents elevation of levels of activated astrocytes, prevents elevation of levels of macrophages, prevents elevation of levels of hyperphosphorylated Tau, prevents incidence of microhemorrhage, prevents neuroinflammation, prevents elevation of levels of circulating proinflammatory cytokines, or any combination thereof, in the subject.

[0444] 42. The method of any one of arrangements 35-41, wherein administration of the anti-Gal3 antibody or binding fragment thereof to the subject treats the TBI, concussion, edema, diffuse axonal injury, spinal cord injury, coma, neuroinflammation, microhemorrhage, astrocytosis, activated microglia, and/or hematoma.

[0445] 43. The method of any one of arrangements 35-42, wherein administration of the anti-Gal3 antibody or binding fragment thereof improves the level of consciousness, memory loss, and/or the Glasgow Coma Scale of the patient; and/or reduces levels of activated microglia, reduces levels of activated astrocytes, reduces levels of macrophages, reduces levels of hyperphosphorylated Tau, reduces microhemorrhage, reduces neuroinflammation, reduces levels of circulating proinflammatory cytokines or any combination thereof, in the subject.

[0446] 44. The method of arrangement 43, wherein the reduction in levels of activated microglia, reduction in levels of activated astrocytes, reduction in levels of macrophages, reduction in levels of hyperphosphorylated Tau, reduction in microhemorrhage, reduction in neuroinflammation, reduction in levels of circulating proinflammatory cytokines, or any combination thereof, in the subject, is by at least 5%, 10%, 20%, 30%, 40%, 50%, 60%, 70%, 80%, 90%, or 95%, or any percentage within a range defined by any two of the aforementioned reductions.

[0447] 45. The method of arrangements 43 or 44, wherein the reduction in levels of activated microglia in the subject is by at least 70%.

[0448] 46. The method of any one of arrangements 43-45, wherein the reduction in levels of activated microglia is assessed by detection of microglia activation markers, optionally ionized calcium-binding adaptor molecule 1 (Iba1), monocyte chemoattractant protein-1 (MCP-1), chitinase-3-like protein 1 (YKL-40), and/or soluble CD14 (sCD14), optionally from the cerebrospinal fluid of the subject.

[0449] 47. The method of any one of arrangements 43-46, wherein the reduction in levels of activated astrocytes in the subject is by at least 90%.

[0450] 48. The method of any one of arrangements 43-47, wherein the reduction in levels of activated astrocytes is assessed by detection of astrocyte activation markers, optionally GFAP, optionally from the cerebrospinal fluid of the subject.

[0451] 49. The method of any one of arrangements 43-48, wherein the reduction in levels of macrophages in the subject is by at least 70%.

[0452] 50. The method of any one of arrangements 43-49, wherein the reduction in levels of macrophages is assessed by detection of macrophage activation markers, optionally CD68, optionally from the cerebrospinal fluid of the subject.

[0453] 51. The method of any one of arrangements 43-50, wherein the reduction in levels of hyperphosphorylated Tau in the subject is by at least 80%.

[0454] 52. The method of any one of arrangements 43-51, wherein the reduction in levels of microhemorrhage in the subject is by at least 80%.

[0455] 53. The method of any one of arrangements 43-52, wherein the reduction in levels of microhemorrhage is assessed by neuroimaging, MRI, and/or Prussian blue staining.

[0456] 54. The method of any one of arrangements 43-53, wherein the reduction in neuroinflammation in the subject is by at least 70%.

[0457] 55. The method of any one of arrangements 43-54, wherein the proinflammatory cytokines comprise IL-6, IL-10, and/or TNF-α.

[0458] 56. The method of any one of arrangements 35-55, wherein the anti-Gal3 antibody or binding fragment thereof is administered enterally, orally, intranasally, parenterally, intracranially, subcutaneously, intramuscularly, intradermally, or intravenously, or any combination thereof, optionally intravenously.

[0459] 57. The method of any one of arrangements 35-56, wherein administering an anti-Gal3 antibody or binding fragment thereof to the subject comprises administration of one or more unit doses of the anti-Gal3 antibody or binding fragment thereof, optionally 1, 2, 3, 4, 5, 6, 7, 8, 9, or 10 unit doses.

[0460] 58. The method of arrangement 57, wherein the one or more unit doses comprise 50, 60, 70, 80, 90, 100, 200, 300, 400, 500, 600, 700, 800, 900, 1000, 1100, 1200, 1300, 1400, 1500, 1600, 1700, 1800, 1900, 2000, 2500, 3000, 3500, 4000, 4500 or 5000 mg of the anti-Gal3 antibody or binding fragment thereof per unit dose, or any amount per unit dose within a range defined by any two of the aforementioned amounts per unit dose.

[0461] 59. The method of arrangements 57 or 58, wherein the one or more unit doses comprise 1, 1.1, 1.2, 1.3, 1.4, 1.5, 1.6, 1.7, 1.8, 1.9, 2, 3, 4, 5, 6, 7, 8, 9, 10, 15, 20, 25, 30, 35, 40, 45, 50, 55, 60, 65, 70, 75, 80, 85, 90, 95, 100, 105, 110, 115, 120, 125, 130, 135, 140, 145, or 150 mg/kg weight of the subject, or any amount per unit dose within a range defined by any two of the aforementioned amounts per unit dose.

[0462] 60. The method of any one of arrangements 57-59, wherein the one or more unit doses are administered every 1, 2, 3, 4, 5, 6, or 7 days, or 1, 2, 3, or 4 weeks, or any interval within a range defined by any two of the aforementioned intervals.

[0463] 61. The method of any one of arrangements 35-60, wherein the anti-Gal3 antibody or binding fragment thereof comprises one or more of: TB001, TB006, 12G5.D7, 13A12.2E5, 14H10.2C9, 15F10.2D6, 19B5.2E6, 20D11.2C6, 20H5.A3, 23H9.2E4, 2D10.2B2, 3B11.2G2, 7D8.2D8, mIMT001, 4A11.2B5, 4A11.H1L1, 4A11.H4L2, 4G2.2G6, 6B3.2D3, 6H6.2D6, 9H2.2H10, 13G4.2F8, 13H12.2F8, 15G7.2A7, 19D9.2E5, 23B10.2B12, 24D12.2H9, F846C.1B2, F846C.1F5, F846C.1H12, F846C.1H5, F846C.2H3, F846TC.14A2, F846TC.14E4, F846TC.16B5, F846TC.7F10, F847C.10B9, F847C.11B1, F847C.12F12, F847C.26F5, F847C.4B10, F849C.8D10, F849C.8H3, 846.2B11, 846.4D5, 846T.1H2, 847.14H4, 846.2D4, 846.2F11, 846T.10B1, 846T.2E3, 846T.4C9, 846T.4E11, 846T.4F5, 846T.8D1, 847.10C9, 847.11D6, 847.15D12, 847.15F9, 847.15H11, 847.20H7, 847.21B11, 847.27B9, 847.28D1, 847.2B8, 847.3B3, 849.1D2, 849.2D7, 849.2F12, 849.4B2, 849.4F12, 849.4F2, 849.5C2, 849.8D12, F847C.21H6, 849.5H1, 847.23F11, 847.16D10, 847.13E2-mH0mL1, 847.13E2-mH0mL2, 847.12C4, 847.4D3, 2D10-VH0-VL0, 2D10-hVH4-HVL1, 2D10-hVH4-HVL2, 2D10-hVH4-HVL3, 2D10-hVH4-HVL4, 2D10-hVH3-HVL1, 2D10-hVH3-HVL2, 2D10-hVH3-HVL3, 2D10-hVH3-HVL4, 20H5.A3-VH3VL1, 20H5.A3-VH3VL3, 20H5.A3-VH4VL1, 20H5.A3-VH5VL1, 20H5.A3-VH5VL3, 20H5.A3-VH6VL1, 20H5.A3-VH6VL3, or binding fragment thereof.

[0464] 62. The method of any one of arrangements 35-61, wherein the anti-Gal3 antibody or binding fragment thereof comprises one or more of: TB001, TB006, F846C.1F5, F846TC.16B5, 14H10.2C9, 15G7.2A7, 20H5.A3, 19D9.2E5, 19B5.2E6, or F847C.21H6.

[0465] 63. The method of any one of arrangements 35-62, wherein the anti-Gal3 antibody or binding fragment thereof comprises TB006.

[0466] 64. The method of any one of arrangements 35-63, wherein the anti-Gal3 antibody or binding fragment thereof is administered with one or more additional therapeutic compositions.

[0467] 65. The method of arrangement 64, wherein the one or more additional therapeutic compositions comprise levodopa, bromocriptine, NMDA receptor antagonists, amantadine, memantine, cholinesterase inhibitors, tacrine, rivastigmine, galantamine, donepezil, or any combination thereof.

[0468] 66. A method for inhibiting, reducing, preventing, and/or treating a disorder associated with fibrin activity or dysfunction in a subject in need thereof, comprising administering an anti-Gal3 antibody or binding fragment thereof to the subject, thereby inhibiting, reducing, preventing, and/or treating the disorder associated with fibrin activity or dysfunction.

[0469] 67. The method of arrangement 66, wherein the disorder associated with fibrin activity or dysfunction comprises atherosclerosis, thrombosis, thromboembolism, carotid artery disease, coronary artery disease, peripheral artery disease, myocardial infarction, heart failure, heart attack, hypertension, chronic kidney disease, coagulopathy, or thrombocytopathy.

[0470] 68. The method of arrangement 67, further comprising selecting the subject as having the disorder associated with fibrin activity or dysfunction or at risk of contracting the disorder associated with fibrin activity or dysfunction prior to the administering step.

[0471] 69. The method of arrangement 68, wherein selecting the subject as having the disorder associated with fibrin activity or dysfunction comprises detecting thrombotic biomarkers, optionally fibrinogen, C-reactive protein (CRP), and/or plasminogen activator inhibitor-1 (PAI-1).

[0472] 70. The method of any one of arrangements 66-69, further comprising detecting an amelioration of symptoms associated with the disorder associated with fibrin activity or dysfunction after the administering step.

[0473] 71. The method of any one of arrangements 66-70, wherein administration of the anti-Gal3 antibody or binding fragment thereof to the subject prevents neuroinflammation and/or fibrin oligomerization, in the subject.

[0474] 72. The method of any one of arrangements 66-71, wherein administration of the anti-Gal3 antibody or binding fragment thereof to the subject reduces neuroinflammation and/or fibrin oligomerization in the subject.

[0475] 73. The method of arrangement 72, wherein the reduction in neuroinflammation and/or the reduction in fibrin oligomerization, in the subject, is by at least 5%, 10%, 20%, 30%, 40%, 50%, 60%, 70%, 80%, 90%, or 95%, or any percentage within a range defined by any two of the aforementioned reductions.

[0476] 74. The method of any one of arrangements 66-73, wherein the anti-Gal3 antibody or binding fragment thereof is administered enterally, orally, intranasally, parenterally, intracranially, subcutaneously, intramuscularly, intradermally, or intravenously, or any combination thereof, optionally intravenously.

[0477] 75. The method of any one of arrangements 66-74, wherein administering an anti-Gal3 antibody or binding fragment thereof to the subject comprises administration of one or more unit doses of the anti-Gal3 antibody or binding fragment thereof, optionally 1, 2, 3, 4, 5, 6, 7, 8, 9, or 10 unit doses.

[0478] 76. The method of arrangement 75, wherein the one or more unit doses comprise 50, 60, 70, 80, 90, 100, 200, 300, 400, 500, 600, 700, 800, 900, 1000, 1100, 1200, 1300, 1400, 1500, 1600, 1700, 1800, 1900, 2000, 2500, 3000, 3500, 4000, 4500 or 5000 mg of the anti-Gal3 antibody or binding fragment thereof per unit dose, or any amount per unit dose within a range defined by any two of the aforementioned amounts per unit dose

[0479] 77. The method of arrangements 75 or 76, wherein the one or more unit doses comprise 1, 1.1, 1.2, 1.3, 1.4, 1.5, 1.6, 1.7, 1.8, 1.9, 2, 3, 4, 5, 6, 7, 8, 9, 10, 15, 20, 25, 30, 35, 40, 45, 50, 55, 60, 65, 70, 75, 80, 85, 90, 95, 100, 105, 110, 115, 120, 125, 130, 135, 140, 145, or 150 mg/kg weight of the subject, or any amount per unit dose within a range defined by any two of the aforementioned amounts per unit dose.

[0480] 78. The method of any one of arrangements 75-77, wherein the one or more unit doses are administered every 1, 2, 3, 4, 5, 6, or 7 days, or 1, 2, 3, or 4 weeks, or any interval within a range defined by any two of the aforementioned intervals.

[0481] 79. The method of any one of arrangements 66-78, wherein the anti-Gal3 antibody or binding fragment thereof comprises one or more of: TB001, TB006, 12G5.D7, 13A12.2E5, 14H10.2C9, 15F10.2D6, 19B5.2E6, 20D11.2C6, 20H5.A3, 23H9.2E4, 2D10.2B2, 3B11.2G2, 7D8.2D8, mIMT001, 4A11.2B5, 4A11.H1L1, 4A11.H4L2, 4G2.2G6, 6B3.2D3, 6H6.2D6, 9H2.2H10, 13G4.2F8, 13H12.2F8, 15G7.2A7, 19D9.2E5, 23B10.2B12, 24D12.2H9, F846C.1B2, F846C.1F5, F846C.1H12, F846C.1H5, F846C.2H3, F846TC.14A2, F846TC.14E4, F846TC.16B5, F846TC.7F10, F847C.10B9, F847C.11B1, F847C.12F12, F847C.26F5, F847C.4B10, F849C.8D10, F849C.8H3, 846.2B11, 846.4D5, 846T.1H2, 847.14H4, 846.2D4, 846.2F11, 846T.10B1, 846T.2E3, 846T.4C9, 846T.4E11, 846T.4F5, 846T.8D1, 847.10C9, 847.11D6, 847.15D12, 847.15F9, 847.15H11, 847.20H7, 847.21B11, 847.27B9, 847.28D1, 847.2B8, 847.3B3, 849.1D2, 849.2D7, 849.2F12, 849.4B2, 849.4F12, 849.4F2, 849.5C2, 849.8D12, F847C.21H6, 849.5H1, 847.23F11, 847.16D10, 847.13E2-mH0mL1, 847.13E2-mH0mL2, 847.12C4, 847.4D3, 2D10-VH0-VL0, 2D10-hVH4-HVL1, 2D10-hVH4-HVL2, 2D10-hVH4-HVL3, 2D10-hVH4-HVL4, 2D10-hVH3-HVL1, 2D10-hVH3-HVL2, 2D10-hVH3-HVL3, 2D10-hVH3-HVL4, 20H5.A3-VH3VL1, 20H5.A3-VH3VL3, 20H5.A3-VH4VL1, 20H5.A3-VH5VL1, 20H5.A3-VH5VL3, 20H5.A3-VH6VL1, 20H5.A3-VH6VL3, or binding fragment thereof

[0482] 80. The method of any one of arrangements 66-79, wherein the anti-Gal3 antibody or binding fragment thereof comprises one or more of: TB001, TB006, F846C.1F5, F846TC.16B5, 14H10.2C9, 15G7.2A7, 20H5.A3, 19D9.2E5, 19B5.2E6, or F847C.21H6.

[0483] 81. The method of any one of arrangements 66-80, wherein the anti-Gal3 antibody or binding fragment thereof comprises TB006.

[0484] 82. The method of any one of arrangements 66-81, wherein the anti-Gal3 antibody or binding fragment thereof is administered with one or more additional therapeutic compositions.

[0485] 83. The method of arrangement 82, wherein the one or more additional therapeutic compositions comprises anti-clotting agents, aspirin, statins, antihypertensives, diuretics, calcium channel blockers, ACE inhibitors, angiotensin II receptor antagonists, adrenergic receptor antagonists, vasodilators, renin inhibitors, aldosterone receptor antagonists, endothelium receptor blockers, or any combination thereof.

[0486] 84. The method of any one of arrangements 1-83, wherein administering an anti-Gal3 antibody or binding fragment thereof to the subject comprises administration of 5 unit doses of the anti-Gal3 antibody or binding fragment thereof, wherein each unit dose comprises 1000 mg or about 1000 mg of the anti-Gal3 antibody or binding fragment thereof, wherein the unit doses are administered every 7 days or about 7 days, and wherein each unit dose is administered over the course of 1 hour or about 1 hour.

[0487] 85. A method comprising administering 5 unit doses of an anti-Gal3 antibody or binding fragment thereof, wherein each unit dose comprise 1000 mg or about 1000 mg of the anti-Gal3 antibody or binding fragment thereof, wherein the unit doses are administered every 7 days or about 7 days, and wherein each unit dose is administered over the course of 1 hour or about 1 hour.

[0488] 86. The method of arrangements 84 or 85, wherein the anti-Gal3 antibody or binding fragment thereof is TB006 or a binding fragment thereof.

[0489] 87. The method of any one of arrangements 84-86, wherein each unit dose is formulated as 1000 mg or about 1000 mg of the anti-Gal3 antibody or binding fragment thereof in 250 mL of sterile saline.

[0490] 88. The method of any one of arrangements 84-87, wherein each unit dose is prepared from single-use sealed injectable glass vials comprising 8 mL of 20 mg/mL of the anti-Gal3 antibody or binding fragment thereof.

[0491] 89. The method of any one of arrangements 84-88, wherein the anti-Gal3 antibody or binding fragment thereof is administered intravenously.

[0492] 90. A single-use sealed injectable glass vial comprising 8 mL of 20 mg/mL of an anti-Gal antibody or binding fragment thereof, optionally wherein the anti-Gal3 antibody or binding fragment thereof is TB006 or a binding fragment thereof.

[0493] 91. An IV infusion bag comprising 1000 mg or about 1000 mg of an anti-Gal3 antibody or binding fragment thereof dissolved in 250 mL or about 250 mL of saline, optionally wherein the anti-Gal3 antibody or binding fragment thereof is TB006 or a binding fragment thereof.

### Numbered Arrangements 2

[0494] Some embodiments provided herein are described by way of the following provided numbered arrangements and also provided as possible combinations or overlapping embodiments:

[0495] 1. An anti-Gal3 antibody for use in inhibiting, reducing, preventing, and/or treating stroke in a subject in need thereof, wherein
[0496] the anti-Gal3 antibody or binding fragment thereof comprises one or more of: TB001, TB006, 12G5.D7, 13A12.2E5, 14H10.2C9, 15F10.2D6, 19B5.2E6, 20D11.2C6, 20H5.A3, 23H9.2E4, 2D10.2B2, 3B11.2G2, 7D8.2D8, mIMT001, 4A11.2B5, 4A11.H1L1, 4A11.H4L2, 4G2.2G6, 6B3.2D3, 6H6.2D6, 9H2.2H10, 13G4.2F8, 13H12.2F8, 15G7.2A7, 19D9.2E5, 23B10.2B12, 24D12.2H9, F846C.1B2, F846C.1F5, F846C.1H12, F846C.1H5, F846C.2H3, F846TC.14A2, F846TC.14E4, F846TC.16B5, F846TC.7F10, F847C.10B9, F847C.11B1, F847C.12F12, F847C.26F5, F847C.4B10, F849C.8D10, F849C.8H3, 846.2B11, 846.4D5, 846T.1H2, 847.14H4, 846.2D4, 846.2F11, 846T.10B1, 846T.2E3, 846T.4C9, 846T.4E11, 846T.4F5, 846T.8D1, 847.10C9, 847.11D6, 847.15D12, 847.15F9, 847.15H11, 847.20H7, 847.21B11, 847.27B9, 847.28D1, 847.2B8, 847.3B3, 849.1D2, 849.2D7, 849.2F12, 849.4B2, 849.4F12, 849.4F2, 849.5C2, 849.8D12, F847C.21H6, 849.5H1, 847.23F11, 847.16D10, 847.13E2-mH0mL1, 847.13E2-mH0mL2, 847.12C4, 847.4D3, 2D10-VH0-VL0, 2D10-hVH4-HVL1, 2D10-hVH4-HVL2, 2D10-hVH4-HVL3, 2D10-hVH4-HVL4, 2D10-hVH3-HVL1, 2D10-hVH3-HVL2, 2D10-hVH3-HVL3, 2D10-hVH3-HVL4, 20H5.A3-VH3VL1, 20H5.A3-VH3VL3, 20H5.A3-VH4VL1, 20H5.A3-VH5VL1, 20H5.A3-VH5VL3, 20H5.A3-VH6VL1, 20H5.A3-VH6VL3, TB001, TB006, F846C.1F5, F846TC.16B5, 14H10.2C9, 15G7.2A7, 20H5.A3, 19D9.2E5, 19B5.2E6, or F847C.21H6, or a binding fragment thereof; and wherein
[0497] administration of the anti-Gal3 antibody or binding fragment thereof to the subject, inhibits, reduces, prevents, and/or treats the stroke.

[0498] 2. An anti-Gal3 antibody for use in inhibiting, reducing, preventing, and/or treating traumatic brain injury (TBI) in a subject in need thereof, wherein
[0499] the anti-Gal3 antibody or binding fragment thereof comprises one or more of: TB001, TB006, 12G5.D7, 13A12.2E5, 14H10.2C9, 15F10.2D6, 19B5.2E6, 20D11.2C6, 20H5.A3, 23H9.2E4, 2D10.2B2, 3B11.2G2, 7D8.2D8, mIMT001, 4A11.2B5, 4A11.H1L1, 4A11.H4L2, 4G2.2G6, 6B3.2D3, 6H6.2D6, 9H2.2H10, 13G4.2F8, 13H12.2F8, 15G7.2A7, 19D9.2E5, 23B10.2B12, 24D12.2H9, F846C.1B2, F846C.1F5, F846C.1H12, F846C.1H5, F846C.2H3, F846TC.14A2, F846TC.14E4, F846TC.16B5, F846TC.7F10, F847C.10B9, F847C.11B1, F847C.12F12, F847C.26F5, F847C.4B10, F849C.8D10, F849C.8H3, 846.2B11, 846.4D5, 846T.1H2, 847.14H4, 846.2D4, 846.2F11, 846T.10B1, 846T.2E3, 846T.4C9, 846T.4E11, 846T.4F5, 846T.8D1, 847.10C9, 847.11D6, 847.15D12, 847.15F9, 847.15H11, 847.20H7, 847.21B11, 847.27B9, 847.28D1, 847.2B8, 847.3B3, 849.1D2, 849.2D7, 849.2F12, 849.4B2, 849.4F12, 849.4F2, 849.5C2, 849.8D12, F847C.21H6, 849.5H1, 847.23F11, 847.16D10, 847.13E2-mH0mL1, 847.13E2-mH0mL2, 847.12C4, 847.4D3, 2D10-VH0-VL0, 2D10-hVH4-HVL1, 2D10-hVH4-HVL2, 2D10-hVH4-HVL3, 2D10-hVH4-HVL4, 2D10-hVH3-HVL1, 2D10-hVH3-HVL2, 2D10-hVH3-HVL3, 2D10-hVH3-HVL4, 20H5.A3-VH3VL1, 20H5.A3-VH3VL3, 20H5.A3-VH4VL1, 20H5.A3-VH5VL1, 20H5.A3-VH5VL3, 20H5.A3-VH6VL1, 20H5.A3-VH6VL3, TB001, TB006, F846C.1F5, F846TC.16B5, 14H10.2C9, 15G7.2A7, 20H5.A3, 19D9.2E5, 19B5.2E6, or F847C.21H6, or a binding fragment thereof; and wherein
[0500] administration of the anti-Gal3 antibody or binding fragment thereof to the subject, thereby inhibits, reduces, prevents, and/or treats the TBI.

[0501] 3. An anti-Gal3 antibody for use in inhibiting, reducing, preventing, and/or treating a disorder associated with fibrin activity or dysfunction in a subject in need thereof, An anti-Gal3 antibody for use in inhibiting, reducing, preventing, and/or treating traumatic brain injury (TBI) in a subject in need thereof, wherein
[0502] the anti-Gal3 antibody or binding fragment thereof comprises one or more of: TB001, TB006, 12G5.D7, 13A12.2E5, 14H10.2C9, 15F10.2D6, 19B5.2E6, 20D11.2C6, 20H5.A3, 23H9.2E4, 2D10.2B2, 3B11.2G2, 7D8.2D8, mIMT001, 4A11.2B5, 4A11.H1L1, 4A11.H4L2, 4G2.2G6, 6B3.2D3, 6H6.2D6, 9H2.2H10, 13G4.2F8, 13H12.2F8, 15G7.2A7, 19D9.2E5, 23B10.2B12, 24D12.2H9, F846C.1B2, F846C.1F5, F846C.1H12, F846C.1H5, F846C.2H3, F846TC.14A2, F846TC.14E4, F846TC.16B5, F846TC.7F10, F847C.10B9, F847C.11B1, F847C.12F12, F847C.26F5, F847C.4B10, F849C.8D10, F849C.8H3, 846.2B11, 846.4D5, 846T.1H2, 847.14H4, 846.2D4, 846.2F11, 846T.10B1, 846T.2E3, 846T.4C9, 846T.4E11, 846T.4F5, 846T.8D1, 847.10C9, 847.11D6, 847.15D12, 847.15F9, 847.15H11, 847.20H7, 847.21B11, 847.27B9, 847.28D1, 847.2B8, 847.3B3, 849.1D2, 849.2D7, 849.2F12, 849.4B2, 849.4F12, 849.4F2, 849.5C2, 849.8D12, F847C.21H6, 849.5H1, 847.23F11, 847.16D10, 847.13E2-mH0mL1, 847.13E2-mH0mL2, 847.12C4, 847.4D3, 2D10-VH0-VL0, 2D10-hVH4-HVL1, 2D10-hVH4-HVL2, 2D10-hVH4-HVL3, 2D10-hVH4-HVL4, 2D10-hVH3-HVL1, 2D10-hVH3-HVL2, 2D10-hVH3-HVL3, 2D10-hVH3-HVL4, 20H5.A3-VH3VL1, 20H5.A3-VH3VL3, 20H5.A3-VH4VL1, 20H5.A3-VH5VL1, 20H5.A3-VH5VL3, 20H5.A3-VH6VL1, 20H5.A3-VH6VL3, TB001, TB006, F846C.1F5, F846TC.16B5, 14H10.2C9, 15G7.2A7, 20H5.A3, 19D9.2E5, 19B5.2E6, or F847C.21H6, or a binding fragment thereof; and wherein
[0503] administration of the anti-Gal3 antibody or binding fragment thereof to the subject, thereby inhibits, reduces, prevents, and/or treats the disorder associated with fibrin activity or dysfunction.

[0504] 4. A method comprising administering 5 unit doses of an anti-Gal3 antibody or binding fragment thereof, wherein each unit dose comprise 1000 mg or about 1000 mg of the anti-Gal3 antibody or binding fragment thereof, wherein the unit doses are administered every 7 days or about 7 days, and wherein each unit dose is administered over the course of 1 hour or about 1 hour.

[0505] 5. A single-use sealed injectable glass vial comprising 8 mL of 20 mg/mL of an anti-Gal antibody or binding fragment thereof, optionally wherein the anti-Gal3 antibody or binding fragment thereof is TB006 or a binding fragment thereof.

[0506] 6. An IV infusion bag comprising 1000 mg or about 1000 mg of an anti-Gal3 antibody or binding fragment thereof dissolved in 250 mL or about 250 mL of saline, optionally wherein the anti-Gal3 antibody or binding fragment thereof is TB006 or a binding fragment thereof.

[0507] 7. The use of any one of the previous arrangements, wherein
[0508] a.) the subject is identified as having the stroke or at risk of contracting the stroke prior to the administering step;
[0509] b.) selecting the subject as having the stroke or at risk of contracting the stroke prior to the administering step;
[0510] c.) selecting the subject as having the stroke or at risk of contracting the stroke comprises assessing the subject according to the National Institutes of Health Stroke Scale (NIHSS), modified Rankin Scale (mRS), Fugl-Meyer Assessment (FMA), Montreal Cognitive Assessment (MoCA), neuroimaging, optionally CT or MRI, and/or detecting stroke biomarkers, optionally S100 calcium binding protein B (S100B), glial fibrillary acidic protein (GFAP), neuron-specific enolase (NSE), and/or matrix metalloproteinase-9 (MMP9);
[0511] d.) an amelioration of symptoms associated with the stroke is detected after the administering step;
[0512] e.) detecting an amelioration of symptoms associated with the stroke after the administering step comprises detecting an improvement by the subject according to the NIHSS, mRS, FMA, or MoCA;
[0513] f.) the improvement by the subject according to the NIHSS comprises at least a 4 point decrease on the NIHSS;
[0514] g.) the improvement by the subject according to the mRS comprises at least a 1 point decrease on the mRS;
[0515] h.) the improvement by the subject according to the FMA comprises at least a 1 point increase on the FMA;
[0516] i.) the improvement by the subject according to the MoCA comprises at least a 1 point increase on the MoCA;
[0517] j.) improvement by the subject according to the NIHSS, mRS, FMA, or MoCA is assessed 7, 35, and/or 75 days after the administering step;
[0518] k.) improvement by the subject according to the NIHSS, mRS, FMA, or MoCA is detected 7, 35, and/or 75 days after the administering step;
[0519] ischemic attack, hemorrhagic stroke, intracerebral hemorrhage, or subarachnoid hemorrhage;
[0520] m.) the stroke is intracerebral hemorrhage (ICH), optionally wherein the ICH is associated with deposition of amyloid aggregates and/or cerebral amyloid angiopathy (CAA);
[0521] n.) administration of the anti-Gal3 antibody or binding fragment thereof to the subject prevents the stroke;
[0522] o.) administration of the anti-Gal3 antibody or binding fragment thereof prevents loss of locomotor dysfunction, prevents incidence of microhemorrhage, prevents elevation of levels of activated microglia, prevents elevation of levels of activated astrocytes, prevents elevation of circulating proinflammatory immune cells, prevents elevation of circulating proinflammatory cytokines, or any combination thereof, in the subject;
[0523] p.) administration of the anti-Gal3 antibody or binding fragment thereof to the subject treats the stroke;
[0524] q.) the reduction in locomotor dysfunction, reduction in microhemorrhage, reduction in levels of activated microglia, reduction in levels of activated astrocytes, reduction in levels of circulating proinflammatory cytokines, or any combination thereof, in the subject, is by at least 5%, 10%, 20%, 30%, 40%, 50%, 60%, 70%, 80%, 90%, or 95%, or any percentage within a range defined by any two of the aforementioned reductions;
[0525] r.) the reduction in locomotor dysfunction is assessed by the Fugl-Meyer Assessment (FMA), Motor Assessment Scale (MAS), and/or the Chedoke-McMaster Stroke Assessment (CMSA);
[0526] s.) the reduction in microhemorrhage is assessed by neuroimaging, MRI, and/or Prussian blue staining;
[0527] t.) the reduction in levels of activated microglia is assessed by detection of microglia activation markers, optionally ionized calcium-binding adaptor molecule 1 (Iba1), monocyte chemoattractant protein-1 (MCP-1), chitinase-3-like protein 1 (YKL-40), and/or soluble CD14 (sCD14), optionally from the cerebrospinal fluid of the subject;
[0528] u.) the reduction in levels of activated astrocytes is assessed by detection of astrocyte activation markers, optionally GFAP and/or S100B, optionally from the cerebrospinal fluid of the subject;
[0529] v.) the proinflammatory immune cells comprise NK cells, monocytes, and/or lymphocytes;
[0530] w.) the proinflammatory cytokines comprise IL-6, TNF-α, and/or IL1β; x.) administering an anti-Gal3 antibody or binding fragment thereof to the subject comprises administration of one or more unit doses of the anti-Gal3 antibody or binding fragment thereof, optionally 1, 2, 3, 4, 5, 6, 7, 8, 9, or 10 unit doses;
[0531] 500, 600, 700, 800, 900, 1000, 1100, 1200, 1300, 1400, 1500, 1600, 1700, 1800, 1900, 2000, 2500, 3000, 3500, 4000, 4500 or 5000 mg of the anti-Gal3 antibody or binding fragment thereof per unit dose, or any amount per unit dose within a range defined by any two of the aforementioned amounts per unit dose;
[0532] z.) the one or more unit doses comprise 1, 1.1, 1.2, 1.3, 1.4, 1.5, 1.6, 1.7, 1.8, 80, 85, 90, 95, 100, 105, 110, 115, 120, 125, 130, 135, 140, 145, or 150 mg/kg weight of the subject, or any amount per unit dose within a range defined by any two of the aforementioned amounts per unit dose;
[0533] or 1, 2, 3, or 4 weeks, or any interval within a range defined by any two of the aforementioned intervals;
[0534] bb.) the anti-Gal3 antibody or binding fragment thereof is administered enterally, orally, intranasally, parenterally, intracranially, subcutaneously, intramuscularly, intradermally, or intravenously, or any combination thereof, optionally intravenously;
[0535] cc.)the anti-Gal3 antibody or binding fragment thereof is administered with one or more additional therapeutic compositions;
[0536] dd.) the stroke is ischemic stroke, thrombotic stroke, embolic stroke, or transient ischemic attack, and the one or more additional therapeutic compositions comprise thrombolytics, tissue plasminogen activator (tPA), alteplase, reteplase, tenecteplase, desmoteplase, anticoagulants, ACE inhibitors, antihypertensives, nicardipine, or any combination thereof;
[0537] ee.)the stroke is hemorrhagic stroke, intracerebral hemorrhage, or subarachnoid hemorrhage, and the one or more additional therapeutic compositions comprise antihypertensives, or nicardipine, or any combination thereof;
[0538] ff.) the subject is selected as having the TBI or at risk of contracting the TBI prior to the administering step;
[0539] gg.) selecting the subject as having the TBI comprises assessing the subject for level of consciousness, memory loss, and/or the Glasgow Coma Scale, neuroimaging, optionally CT or MRI and/or detecting TBI biomarkers, optionally GFAP and/or ubiquitin carboxy-terminal hydrolase L1 (UCH-L1);
[0540] hh.) an amelioration of symptoms associated with the TBI is detected after the administering step;
[0541] ii.) the TBI is associated with a concussion, edema, diffuse axonal injury, spinal cord injury, coma, neuroinflammation, microhemorrhage, astrocytosis, activated microglia, and/or hematoma;
[0542] jj.) administration of the anti-Gal3 antibody or binding fragment thereof to the subject prevents the TBI, concussion, edema, diffuse axonal injury, spinal cord injury, coma, neuroinflammation, microhemorrhage, astrocytosis, activated microglia, and/or hematoma;
[0543] kk.) administration of the anti-Gal3 antibody or binding fragment thereof prevents elevation of levels of activated microglia, prevents elevation of levels of activated astrocytes, prevents elevation of levels of macrophages, prevents elevation of levels of hyperphosphorylated Tau, prevents incidence of microhemorrhage, prevents neuroinflammation, prevents elevation of levels of circulating proinflammatory cytokines, or any combination thereof, in the subject;
[0544] 11.) administration of the anti-Gal3 antibody or binding fragment thereof to the subject treats the TBI, concussion, edema, diffuse axonal injury, spinal cord injury, coma, neuroinflammation, microhemorrhage, astrocytosis, activated microglia, and/or hematoma;
[0545] mm.) administration of the anti-Gal3 antibody or binding fragment thereof improves the level of consciousness, memory loss, and/or the Glasgow Coma Scale of the patient; and/or reduces levels of activated microglia, reduces levels of activated astrocytes, reduces levels of macrophages, reduces levels of hyperphosphorylated Tau, reduces microhemorrhage, reduces neuroinflammation, reduces levels of circulating proinflammatory cytokines or any combination thereof, in the subject;
[0546] nn.) reduction in levels of activated microglia is assessed by detection of microglia activation markers, optionally ionized calcium-binding adaptor molecule 1 (Iba1), monocyte chemoattractant protein-1 (MCP-1), chitinase-3-like protein 1 (YKL-40), and/or soluble CD14 (sCD14), optionally from the cerebrospinal fluid of the subject;
[0547] oo.) the reduction in levels of activated astrocytes is assessed by detection of astrocyte activation markers;
[0548] pp.) the reduction in levels of macrophages is assessed by detection of macrophage activation markers, optionally CD68, optionally from the cerebrospinal fluid of the subject;
[0549] qq.) the reduction in levels of microhemorrhage is assessed by neuroimaging, MRI, and/or Prussian blue staining;
[0550] rr.) the proinflammatory cytokines comprise IL-6, IL-10, and/or TNF-α;
[0551] ss.) the anti-Gal3 antibody or binding fragment thereof is administered enterally, orally, intranasally, parenterally, intracranially, subcutaneously, intramuscularly, intradermally, or intravenously, or any combination thereof, optionally intravenously;
[0552] tt.) the disorder associated with fibrin activity or dysfunction comprises atherosclerosis, thrombosis, thromboembolism, carotid artery disease, coronary artery disease, peripheral artery disease, myocardial infarction, heart failure, heart attack, hypertension, chronic kidney disease, coagulopathy, or thrombocytopathy;
[0553] uu.) the subject is selected as having a disorder associated with fibrin activity or dysfunction or at risk of contracting a disorder associated with fibrin activity or dysfunction prior to the administering step;
[0554] vv.) selecting the subject as having the disorder associated with fibrin activity or dysfunction comprises detecting thrombotic biomarkers, optionally fibrinogen, C-reactive protein (CRP), and/or plasminogen activator inhibitor-1 (PAI-1);
[0555] ww.) an amelioration of symptoms associated with a disorder associated with fibrin activity or dysfunction is detected after the administering step;
[0556] xx.) administration of the anti-Gal3 antibody or binding fragment thereof to the subject prevents neuroinflammation and/or fibrin oligomerization, in the subject;
[0557] yy.) administration of the anti-Gal3 antibody or binding fragment thereof to the subject reduces neuroinflammation and/or fibrin oligomerization in the subject;
[0558] zz.) the reduction in neuroinflammation and/or the reduction in fibrin oligomerization, in the subject, is by at least 5%, 10%, 20%, 30%, 40%, 50%, 60%, 70%, 80%, 90%, or 95%, or any percentage within a range defined by any two of the aforementioned reductions;
[0559] aaa.) the one or more additional therapeutic compositions comprises anti-clotting agents, aspirin, statins, antihypertensives, diuretics, calcium channel blockers, ACE inhibitors, angiotensin II receptor antagonists, adrenergic receptor antagonists, vasodilators, renin inhibitors, aldosterone receptor antagonists, endothelium receptor blockers, or any combination thereof;
[0560] bbb.) administering an anti-Gal3 antibody or binding fragment thereof to the subject comprises administration of 5 unit doses of the anti-Gal3 antibody or binding fragment thereof, wherein each unit dose comprises 1000 mg or about 1000 mg of the anti-Gal3 antibody or binding fragment thereof, wherein the unit doses are administered every 7 days or about 7 days, and wherein each unit dose is administered over the course of 1 hour or about 1 hour;
[0561] ccc.) each unit dose is formulated as 1000 mg or about 1000 mg of the anti-Gal3 antibody or binding fragment thereof in 250 mL of sterile saline; or wherein
[0562] ddd.) each unit dose is prepared from single-use sealed injectable glass vials comprising 8 mL of 20 mg/mL of the anti-Gal3 antibody or binding fragment thereof.

### EXAMPLES

[0563] Some aspects of the embodiments discussed above are disclosed in further detail in the following examples, which are not in any way intended to limit the scope of the present disclosure. Those in the art will appreciate that many other embodiments also fall within the scope of the invention, as it is described herein above and in the claims.

### Example 1. Therapeutic Efficacy of Gal3 Antibody in an Intracerebral Hemorrhagic Stroke Model

[0564] Anti-Gal3 antibody treatment (using mTB001 as a representative antibody) was assessed for efficacy and pharmacodynamics in an intracerebral hemorrhage (ICH) model of stroke. Stroke was induced in C57BL/6J mice by stereotactic injection of autologous tail blood. Beginning one week after ICH induction, mice were treated with 8 doses of 10 mg/kg mTB001 or MOPC21 isotype control. Mice that did not receive ICH served as healthy controls. Six weeks after stroke induction, brain pathology was measured with immunohistochemistry (IHC). Anti-Gal3 antibody mTB001 significantly improved locomotor function compared to MOPC21 controls. In the brain, mTB001 reduced levels of microhemorrhages.

[0565] Intracerebral hemorrhage is a potentially fatal stroke subtype that accounts for an in-hospital mortality rate and a disability rate of 40% and 80%, respectively. ICH is responsible for 10-15% of all strokes, and the worldwide incidence of ICH is 2 million cases per year with approximately 120,000 cases per year in the United States. However, the incidence is expected to have doubled by 2050 due to aging and the spreading use of anticoagulants. Notably, there is no effective treatment for ICH, and the pathophysiology of the disease is poorly defined. Some pathogenic effects of ICH may be attributed to deposition of amyloid β (Aβ) in the vasculature, as discussed herein.

[0566] Gal3 belongs to the family of water-soluble lectins, which are sugar binding proteins. Galectins preferentially bind to β-galactoside derivatives and can crosslink surface glycoproteins by binding galactose residues. Gal3 is the only known member of a family of chimera-type galectins which contains a C-terminal carbohydrate recognition domain (CRD) for sugar binding and an N-terminal non-CRD for self-association. Gal3 has ubiquitous subcellular distribution and functions in the nuclear, cytoplasmic, and extracellular compartments. Increasing body of evidence indicates Gal3 as a crucial player involved in regulation of brain inflammation and AD pathology. However, there exists a knowledge gap in the understanding of their cellular expression and function after ICH.

[0567] Induction of intracerebral hemorrhage: Eighteen 10-weeks old C57BL/6J mice had ICH induced by stereotactic injection of autologous tail blood. Animals were anesthetized with isoflurane, placed on a stereotaxic surgery frame, then their shaved heads were sterilized with 70% ethanol and povidone-iodine prep. ICH was induced by the stereotactic injection of autologous tail blood. Hamilton syringe (25 µL) was mounted onto the injection pump, and the needle (26 gauge) stereotactically directed over the bregma. Next, stereotactic manipulator arms were adjusted to position the needle 0.2 mm anterior and 2 mm laterally to the right. At these coordinates, a small cranial burr hole was made using a variable speed drill with a 1 mm drill bit. The tail of mice was disinfected with 70% ethanol. Central tail artery was punctured with a sterile needle (e.g. 26 gauge) and arterial blood was collected into an un-heparinized capillary tube. Blood was quickly transferred from the capillary tube into the glass barrel of the Hamilton syringe, then the plunger was inserted. The Hamilton syringe containing 30 µL or more of arterial blood was mounted onto the injection pump with inserted needle (with its beveled edge facing the sagittal suture) through the burr hole just until its bevel was no longer visible. From this point, the needle was advanced 3 mm ventrally and 5 µL of autologous blood was injected at a rate of 2 µL/min. After completion of the first injection, the needle was advanced to 0.7 mm further in depth. After 5 minutes, 25 µL of blood was injected into the right striatum. Upon completion of the second injection, the needle was left in position for an additional 10 minutes, before withdrawing it at a rate of 1 mm/min. The burr hole was sealed with bone wax, and the skin was sutured.

[0568] Locomotor test using Rotarod: The Rotarod test was used to assess motor coordination and balance in rodents. Testing was performed on a modified Rotarod apparatus. On the day of testing, mice were acclimated in their home cages in the testing room for at least 15 minutes (acclimation phase). Testing consisted of three trials on a modified Rotarod separated by 15 minutes inter-trial intervals. The Rotarod apparatus is a rotating rod with a 5 cm diameter made of hard plastic material covered by grey rubber foam divided into lanes that are each 5 cm wide. Mice were placed in individual lanes while the rod was rotated at 4 revolutions per minute (rpm). Once all the mice were able to walk forward for a few seconds, the trial was started with the rod accelerating from 4 rpm to 40 rpm over the course of 300 seconds. The latency (time) at which each mouse falls off the rod, the distance travelled before falling and the reason for trial end (falling, jumping, or passive rotation) were recorded.

[0569] Dose groups and drug administration: After one week following ICH induction and based on the pre-dose behavior, animals were randomized into two groups based on the Rotarod locomotor function test. One group (n=9) received 8 doses of mTB001 (804-mIgG2a-LALAPG), another group (n=9) received 8 doses of MOPC21 (MOPC21-mIgG2a-LALAPG) as isotype control antibody, each dose was 10 mg/kg. The antibodies were injected intraperitoneally (i.p.) twice in a week. After treatment, mice again underwent locomotor function test. In this behavior procedure, wild type un-injected C57BL/6J mice were also included.

[0570] Sample collection: Mice were anesthetized with isoflurane, blood was collected by cardiac puncture, and mice were perfused transcardially with cold phosphate-buffer saline (PBS). For the comparison, mice dosed eight times either with mTB001 and MOPC21 (isotype control) antibody along with wild type un-injected mice were sacrificed. Brain tissues were fixed for 48 hours with 4% paraformaldehyde in PBS, pH 7.4 at 4° C. and stored in PBS/0.02% sodium azide (NaN₃) at 4° C. until use.

[0571] Immunohistochemistry: Fixed brain tissues were sectioned (40 µm) with a vibratome. Sagittal sections were collected in PBS containing 0.02% NaN₃ and stored at 4° C. prior to staining. Determination of microhemorrhages was performed by staining for ferric acid using Prussian Blue (5% potassium hexacyanoferrate trihydrate + 5% hydrochloric acid) for 30 minutes. Sections were then rinsed with water and counterstained with Nuclear Fast Red. Slides were cover-slipped using DPX mounting media. To stain for microglia and astrocytes, endogenous peroxidase in tissue was blocked by treating with 3% H₂O₂ in PBS for 10 min at 25° C. Non-specific background staining was blocked by 1 hour incubation in 2.5% horse serum, 0.3% Triton-X 100 (TX) at 25° C. Tissues were incubated with primary antibodies against ionized calcium binding adaptor molecule 1 (Iba1; which stains for microglia) or glial fibrillary acidic protein (GF AP; which stains for astrocytes) overnight at 4° C., rinsed three times with PBS, 0.1% TX, followed by biotinylated secondary antibody (anti-mouse) detection with an avidin-biotin complex (ABC) peroxidase kit, and visualized with a 3,3′-diaminobenzidine (DAB) substrate kit. After DAB staining, brain tissues were mounted on Superfrost Plus (ThermoFisher) microscope slides and dehydrated using different percentages of alcohols and xylene. Slides were cover-slipped using DPX mounting media. Control experiments omitting either primary or secondary antibody resulted in no staining. Brain tissues were scanned using an Aperio VERSA Brightfield, Fluorescence & FISH Digital Pathology Scanner.

[0572] Statistical Analysis: The behavioral data were analyzed using GraphPad Prism-8. All values were reported as mean ± SEM and significance set at p < 0.05. NIH ImageJ software was used to analyze the immunohistochemistry and quantification was done using GraphPad Prism-8.

[0573] Induction of Intracerebral hemorrhage (ICH) leads to locomotor deficit: C57BL/6J mice induced with ICH demonstrated significant deficit in locomotor activity before mTB001 dosing, as evidenced by the significantly shorter latency to fall (FIG. 21A) and distance travelled (FIG. 21B) in the Rotarod test as compared to age matched healthy control C57BL/6J mice.

[0574] Treatment with mTB001 improves locomotor function test: Based on the locomotor activity test, mice were randomized and divided into two groups (n=9 animals/group) with similar capabilities (“Before Dosing” measurement). mTB001 and MOPC21 antibodies (10 mg/kg) was administered intraperitoneally. Wild-type mice served as controls. FIG. 22 depicts the exemplary dose regimen used after inducing ICH. Animals were tested for locomotor ability after 4 (FIG. 23A), 6 (FIG. 23B), and 8 doses. After 8 doses of mTB001 antibody, animals performed significantly better on the Rotarod test, as seen by increased latency before fall (FIG. 23C) and distance travelled (FIG. 23D). These data demonstrate that treatment with an anti-Gal3 antibody results in significant improvement in locomotor activity in an animal model of stroke.

[0575] Treatment with mTB001 reduces microhemorrhage: An increased incidence of microhemorrhage has been observed associated with ICH. In addition, the accumulation of Aβ in the blood vessel wall increases the risk of intracranial hemorrhage and stroke in the human brain. The effect of mTB001 on microhemorrhages was measured by Prussian Blue staining. Blood accumulation in the brains of mTB001-treated mice (after 8 doses) was reduced (FIG. 24A), while no microhemorrhage was observed in healthy control sham mice (FIG. 24B). FIG. 24C depicts a quantification of microhemorrhage by brain tissue area seen in FIGS. 24A-B. These data demonstrate that treatment with an anti-Gal3 antibody improves microhemorrhage symptoms in an animal model of stroke.

[0576] Treatment with mTB001 reduces activated microglia: One of the main characteristics of ICH is an enhanced neuroinflammatory response characterized by activation of microglia. The effect of treatment with mTB001 on microglial reactivity was assessed as measured by microglia marker Iba1. FIG. 25A depicts representative photomicrographs from brain sections of mTB001 and MOPC21 (isotype control) treated mice along with age matched wild type mice stained with Iba1 antibody. Image analysis of sections from multiple animals demonstrated that activated microglia deposits in mTB001 treated mice were significantly reduced (**p ≤ 0.01) as compared to isotype control mice (FIG. 25B). These data demonstrate that treatment with an anti-Gal3 antibody improves inflammatory symptoms related to microglia activity in an animal model of stroke.

[0577] Treatment with mTB001 reduces activated astrocytes: Astrogliosis or activation of astrocytes is another characteristic feature of neuroinflammation due to ICH. The effect of treatment with mTB001 on astrocyte reactivity was assessed as measured by astrocyte marker GFAP. FIG. 26A depicts representative photomicrographs from brain sections of mTB001 and MOPC21 (isotype control) treated mice along with age matched wild type mice stained with GFAP antibody. Image analysis of sections from multiple animals demonstrated that activated astrocyte deposits in mTB001 treated mice were significantly reduced (**p ≤ 0.01) as compared with isotype control mice (FIG. 26B). These data demonstrate that treatment with an anti-Gal3 antibody improves inflammatory symptoms related to astrocyte activity in an animal model of stroke.

[0578] In summary, anti-Gal3 antibody treatment is shown to have beneficial effects towards stroke and symptoms thereof. This is particularly striking, as the treatment is able to have efficacy across the blood-brain barrier.

### Example 2. Anti-Gal3 Antibodies Reduce Brain Pathology in a Traumatic Brain Injury Model

[0579] Anti-Gal3 antibody treatment (using mTB001 as a representative antibody) was assessed for efficacy and pharmacodynamics in a controlled cortical impact (CCI) model of traumatic brain injury (TBI). TBI was induced in C57BL/6J mice using a controlled cortical impactor. Following 48 hours after TBI induction, mice were treated with 10 mg/kg mTB001 or MOPC21 isotype control. Mice that did not receive a cortical impact served as healthy controls. After a further 48 hours, brain pathology was measured with IHC, and plasma biomarkers were tested by ELISA. The exemplary anti-Gal3 antibody mTB001 significantly improved locomotor function compared to MOPC21 controls. In the brain, mTB001 reduced levels of CD68+ cells, activated microglia and astrocytes, reduced evidence of microhemorrhage, and enhanced levels of neurons. mTB001 also reduced the exploratory biomarker neurofilament-light (NF-L) in the plasma.

[0580] TBI, which can be caused by a blow, bump, or jolt to the head, penetrating head injury, or explosive blast is an injury that disrupts normal brain function. TBI can be divided into two stages: 1) the primary injury due to the initial mechanical trauma; and 2) the secondary and potentially reversible damage, characterized by cell loss, axonal damage, and neuroinflammation. Specifically, there is evidence of blood-brain barrier damage with microhemorrhage, astrocytosis, and perivascular clusters of activated microglia. In some cases, focal accumulations of hyperphosphorylated tau as well as macrophage infiltration is detected in close proximity to regions of axonal injury.

[0581] Health effects associated with TBI can be broadly categorized into cognitive, behavioral/emotional, motor, and somatic symptoms. Without effective repair, long-term consequences can develop even decades after the original injury, such as chronic traumatic encephalopathy (CTE), dementia, and Parkinson’s disease, each which is associated with the accumulation of hyperphosphorylated tau and destructive neurofibrillary tangles. Therapeutics that can block and reverse disease progression after the primary injury is incurred may have profound, positive life-long effects on patients and their families.

[0582] Gal3 was elevated in TBI patients, and was associated with symptom severity (Glasgow Coma Scale scores) and levels of inflammation (plasma C-reactive protein). In preclinical models of TBI using CCI, expression of Gal3 significantly increased in the cortex, hippocampus, and cerebrospinal fluid (CSF) by 24 hours after TBI induction.

[0583] Mechanistically, Gal3 mainly co-localized with microglia 24 hours after TBI induction and Gal3 could interact with TLR4, a receptor that senses infection and damage and leads to pro-inflammatory activation when triggered. In vitro stimulation of microglia with Gal3 skewed them towards a pro-inflammatory M1 phenotype and away from an antiinflammatory, pro-repair M2 phenotype. When Gal3 levels were reduced by genetic knockout or neutralizing antibodies, neuroinflammation was reduced in vivo after CCI or after direct TLR4 stimulation with intranigral LPS injection.

[0584] Herein, the mouse-reactive anti-Gal3 mIG2a-LALA antibody mTB001 was assessed for efficacy in reducing brain pathology and biomarker levels in plasma of a TBI mouse model.

[0585] Study Design: 10-week old C57BL/6J mice had TBI induced with a controlled cortical impactor. After 48 hours, animals were randomized into two groups. One group was dosed intraperitoneally with 10 mg/kg mTB001 and the other group was dosed with MOPC21 isotype control. Three mice that did not receive CCI served as healthy controls. After 48 hours, brains were harvested for IHC and plasma was collected for biomarker detection.

[0586] Controlled Cortical Impact Procedure: Animals were anesthetized with isoflurane, placed on a stereotaxic surgery frame, and then their shaved heads were sterilized with 70% ethanol and betadine. A midline incision was made to expose the skull and a 3.0 mm craniotomy was made over the right parietal bone (central point: -2.0 mm bregma; lateral point: 2.5 mm) using a 0.5 mm diameter burr bit connected to a hand-held dental drill. A bone flap of radius 2 mm to 2.5 mm was carved out of the skull. The contusion was next made using a controlled cortical impactor (Leica) with 3.0 m/s velocity, 100 ms dwell time, and 2.2 mm impact depth at 20° angle. The bone flap was affixed to the skull with bone wax and skin sutured over it.

[0587] Sample Collection: Mice were anesthetized with isoflurane, blood was collected by cardiac puncture, and mice were perfused transcardially with cold PBS. Brain tissues were fixed for 48 hours with 4% paraformaldehyde in PBS, pH 7.4 at 4° C. and stored in PBS/0.02% NaN₃ at 4° C. until use.

[0588] Immunohistochemistry: Fixed brain tissues were sectioned (40 µm) with a vibratome. Sagittal sections were collected in PBS containing 0.02% NaN₃ from 3 different planes of the brain (about 2.5 mm apart) and stored at 4° C. prior to staining. Endogenous peroxidase in tissue was blocked for all stains by treating with 3% H₂O₂ in PBS for 10 minutes at 25° C. Nonspecific background staining was blocked by 1 hour incubation in 2.5% serum, 0.3% Triton-X 100 (TX) at 25° C. Tissues were incubated with primary antibodies against GFAP, Iba1, CD68, and tau protein (AT8 antibody) overnight at 4° C., rinsed three times with PBS + 0.1% TX, followed by biotinylated secondary antibody (anti-mouse) detection with an ABC peroxidase kit, and visualized with a DAB substrate kit. After DAB staining, brain tissues were mounted on Superfrost Plus slides and dehydrated using different percentages of alcohols and xylene. Determination of microhemorrhages was performed by staining for ferric acid using Prussian Blue for 30 minutes. Sections were then rinsed with water and counterstained with Nuclear Fast Red. Slides were cover-slipped using DPX mounting media. Control experiments omitting either primary or secondary antibody resulted in no staining. Brain tissues were scanned using an Aperio VERSA Brightfield, Fluorescence & FISH Digital Pathology Scanner.

[0589] Statistical Analysis: The data were analyzed using GraphPad Prism-8 using one-way ANOVA. All values are reported as mean ± standard deviation and significance set at p < 0.05.

[0590] mTB001 treatment reduces pathological changes in the brain after traumatic brain injury: To study changes in brain pathology induced by TBI and whether Gal3 antibodies can reduce these changes, animals that did not receive any CCI were compared to animals that received a CCI and treatment with either mTB001 or MOPC21 isotype control. Antibodies were dosed 48 hours after CCI and pathology was assessed by IHC a further 48 hours after antibody treatment. Comparisons first were made between healthy and MOPC21 isotype controls to assess TBI-induced changes. Comparisons were then made between MOPC21 isotype control and mTB001 dosed groups to assess efficacy of anti-Gal3 antibody for TBI.

[0591] The TBI model exhibited increased levels of activated microglia as detected by Iba1 staining, and treatment with mTB001 significantly reduced this (FIG. 27B). Representative stains are shown in FIG. 27A.

[0592] The TBI model exhibited increased levels of activated astrocytes as detected by GFAP staining, and treatment with mTB001 significantly reduced this (FIG. 27D). Representative stains are shown in FIG. 27C.

[0593] The TBI model exhibited increased levels of myeloid populations (e.g., macrophages, microglia) that can be detected by CD68 staining in the brain, and treatment with mTB001 significantly reduced this (FIG. 27F). Representative stains are shown in FIG. 27E.

[0594] The TBI model exhibited increased levels of hyperphosphorylated tau as detected by staining with antibody AT8, and treatment with mTB001 significantly reduced this (FIG. 28B). Representative stains are shown in FIG. 28A.

[0595] The TBI model exhibited increased microhemorrhages as detected by Prussian Blue staining, and treatment with mTB001 significantly reduced this (FIG. 28D). Representative stains are shown in FIG. 28C.

[0596] The exploratory neurological disorder biomarker neurofilament-light (NF-L) was detected in plasma of the TBI model. Treatment with mTB001 reduced NF-L in the plasma of TBI-induced mice after 48 hours of treatment (FIG. 28E). Untreated and MOPC21 isotype-treated mice were used as control.

[0597] In summary, anti-Gal3 antibody treatment is shown to have beneficial effects towards traumatic brain injury (and related neurological insults) and symptoms thereof. This is particularly striking, as the treatment is able to have efficacy across the blood-brain barrier.

### Example 3. Anti-Gal3 Antibodies Inhibit Fibrin Oligomerization

[0598] Thrombosis is a pivotal event in the pathogenesis of diseases such as myocardial infarction, stroke and aneurysms with a 70% to 90% incidence of acute thrombotic occlusion of the artery supplying the infarcted zone in patients with transmural infarctions. In addition, the development of thrombosis overlying the infarcted area may lead to systemic embolization, and deep venous thrombosis develops in 25% of patients as detected by ¹²⁵I-fibrinogen scanning. The fibrin deposition that occurs with these thrombotic events is associated with changes in plasma fibrinogen that may be interpreted either as indicative of a preexisting “hypercoagulable state” or as secondary to the local thrombosis.

[0599] Fibrin polymer is an end product of the enzymatic cascade of blood clotting. In vivo formation of the polymeric fibrin network, along with platelet adhesion and aggregation, are the key events in salutary stopping of bleeding at the site of injury (hemostasis) as well as in pathological vascular occlusion (thrombosis). Fibrin polymerization comprises a number of consecutive reactions, each affecting the ultimate structure and properties of the fibrin scaffold. These properties determine the development and outcomes of various diseases, such as heart attack, ischemic stroke, cancers, trauma, surgical and obstetrical complications, hereditary and acquired coagulopathies, and thrombocytopathies. In addition to providing a better understanding of the pathogenesis of such disorders, the knowledge of the molecular mechanisms of fibrin formation provides a foundation for new diagnostic tools and therapeutic approaches.

[0600] Rupture of an atherosclerotic plaque causes platelet aggregation and activation of the coagulation cascade with formation of thrombin prompting conversion of fibrinogen to fibrin. As a result, a platelet-rich thrombus entrapped in a cross-linked fibrin network is formed, which may result in arterial occlusion and subsequent organ damage.

[0601] Studies have shown that altered structure of fibrin clots is associated with coronary artery disease (CAD) and myocardial infarction (MI). Furthermore, a compact clot structure is associated with cardiovascular risk factors such as diabetes and smoking. Thrombotic and inflammatory markers including fibrinogen and high-sensitive C-reactive protein (hs-CRP) have independently been associated with increased risk of cardiovascular events. Increased plasma levels of fibrinogen directly modulate fibrin clot properties and compromise fibrinolysis, representing one mechanism explaining the association between fibrinogen levels and cardiovascular disease. In addition, markers of inflammation may affect fibrin clot structure and platelet reactivity during antiplatelet therapy. In the brains of Alzheimer’s disease patients, tissue plasminogen activator (tPA)/plasmin fibrinolytic activity is expected to be reduced due to the elevation of plasminogen activator inhibitor-1 (PAI-1) levels in the cerebrospinal fluid of AD patients and the reduction of plasmin activity in AD brains.

[0602] Demonstrated herein, Gal3 can accelerate fibrin oligomerization, and anti-Gal3 antibodies can interfere with this oligomerization, which may have therapeutic benefits.

[0603] To determine if Gal3 can oligomerize fibrin, fibrin protein was incubated with or without Gal3 and samples taken at various time points. Samples were probed on a dot blot with a conformation-specific antibody that binds oligomers. Inclusion of Gal3 rapidly promotes fibrin oligomer formation. To determine if Gal3 antibodies can block this function, various anti-Gal3 antibody clones (and MOPC21-hIgG4 isotype control) were co-incubated with fibrin and Gal3, and oligomer formation assessed on a dot blot.

[0604] FIG. 29 depicts exemplary anti-Gal3 antibodies tested and assigned numbers (#) used throughout this Example and associated data.

[0605] Study Design: To determine the ability of Gal3 to promote oligomerization, 100 µg/mL Gal3 was added to 100 µg/mL fibrin before incubation. For oligomerization of fibrin using Gal3 as an inducer, samples were spotted for 1-5 hours. Alternatively, samples were also taken at 0, 2, 4, 6, and 24 hours after Gal3 addition to fibrin for analysis on a dot blot. During the screening of antibodies, fibrin with and without Gal3 was incubated for 24 hours prior to addition of antibodies. To determine the ability of Gal3 antibodies to degrade fibrin oligomerization, MOPC21-IgG4 isotype control, TB001, TB006, and other anti-Gal3 antibody clones were added to the fibrin/Gal3 mixture and incubated for 24 hours to a final concentration of 100 µg/mL of antibody. Samples were taken at 24 hours for analysis on a dot blot probed with conformation oligomer specific antibody A11.

[0606] Oligomerization of fibrin: 1 mg of fibrin peptide was resuspended in 90 µL of 100 mM NaOH and incubated for 10 minutes. This solution was then diluted to a final concentration of 0.1 mg/mL by adding 10 mM sodium phosphate buffer, pH 7.4. Gal3 with or without antibodies were added to test their effects. The solution was continuously stirred using a stir bar while incubating at room temperature. At various time points after mixing, samples were taken and probed on a dot blot to detect formation of oligomers using A11.

[0607] Dot blots: 2 µL of sample was pipetted onto a Whatman nitrocellulose membrane at the appropriate time points for dot blot. Dot blot membrane was incubated in 10% non-fat milk in TBS-T for 1 hour at room temperature to block nonspecific binding. The blot was then incubated with primary antibody A11 (rabbit polyclonal oligomer conformation antibody) overnight at 4° C. After three 5-minute washes in TBS-T, the membranes were incubated with the appropriate secondary antibody (goat anti-rabbit IgG H&L (HRP)) for 1 hour at room temperature. Following three 5-minute washes in TBS-T, the membrane was incubated in detection reagents for 1-5 seconds. The dot blot images of the results were obtained using an imager (Azure Biosystems) and quantified using Image Studio software. Local background to each dot was subtracted from image intensity to correct for any differences at different areas of the blots.

[0608] Statistical analysis: The quantification was done using Licor Image Studio Lite and results were analyzed in GraphPad Prism-8.

[0609] Results: A11 antibody detects conformational oligomeric structures of various amyloid proteins like fibrin. Fibrin oligomerization is promoted by Gal3 incubation compared to controls without Gal3, as evidenced by the increased intensity of the A11-reactive dots. FIGS. 30A-B show a time course of Gal3 and fibrin incubation over 0-5 hours. FIGS. 31A-B show a time course of Gal3 and fibrin incubation over 0-24 hours (which corresponds to the duration used in later antibody incubation experiments).

[0610] As seen in FIG. 32, Gal3-induced fibrin oligomerization detected by A11 antibody was unaffected by inclusion of MOPC21-hIgG4 isotype control. However, anti-Gal3 antibodies TB001 and TB006 degrade Gal3-induced fibrin oligomerization at tested concentrations of 3, 10, and 100 µg/mL of antibody.

[0611] In addition to TB001 and TB006, various other anti-Gal3 antibody clones were screened for ability to degrade Gal3-induced fibrin oligomers. 100 µg/mL each of fibrin and Gal3 were incubated for 24 hours prior to addition of 100 µg/mL anti-Gal3 antibody clones. The samples were continuously stirred using a stir bar at room temperature. After 24 hours, samples were taken and probed on a dot blot with A11 antibody. FIG. 33A shows that Gal3 intrinsically promotes fibrin oligomers. FIG. 33B shows a dot blot of fibrin oligomer degradation by different anti-Gal3 antibodies as listed according to number in FIG. 29, in duplicate. FIG. 33C shows the quantitative profile of degradation of fibrin oligomers by different anti-Gal3 antibodies of FIG. 33B.

[0612] As demonstrated here, Gal3 promotes fibrin oligomerization and various anti-Gal3 antibody clones can degrade these Gal3-induced fibrin oligomers, while MOPC21 isotype control had no effect. Accordingly, this suggests that anti-Gal3 antibodies can interfere with molecular mechanisms controlling the development and severity of diseases associated with fibrin activity, such as heart attack, ischemic stroke, cancers, trauma, surgical and obstetrical complications, hereditary and acquired coagulopathies, and thrombocytopathies.

### Example 4. Anti-Gal3 Antibodies as Therapeutics for Cerebral Amyloid Angiopathy

[0613] Cerebral amyloid angiopathy (CAA) consists of the deposition of amyloid β (Aβ) peptide in the walls of small to medium-sized arteries, arterioles, and capillaries in the cerebral cortex, leptomeninges, and cerebellum. In as many as 15% of patients with spontaneous ICH, the pathogenesis of ICH is attributed to CAA. However, the deposition of amyloid in cerebral vessels is common, and the extent of amyloid deposition is age related. CAA may be confirmed from the autopsy of 10% to 50% of the elderly population, in 80% of patients with Alzheimer’s disease and in 50% of patients with ICH. Stroke and Alzheimer’s disease are cerebral pathologies with high socioeconomic impact that can occur together and mutually interact. Vascular factors predisposing to cerebrovascular disease have also been specifically associated with development of AD, and acute stroke is known to increase the risk to develop dementia. Despite the apparent association, it remains unknown how acute cerebrovascular disease and development of AD are precisely linked and act on each other. It has been suggested that this interaction is strongly related to vascular deposition of Aβ (i.e., CAA). Furthermore, the blood-brain barrier (BBB), perivascular space, and the glymphatic system, the latter proposedly responsible for the drainage of solutes from the brain parenchyma, may represent key pathophysiological pathways linking stroke, Aβ deposition, and dementia.

[0614] There are many links between hemostasis and cerebrovascular pathology in AD. Aβ can activate platelets, induce microhemorrhages in the brain, and interact with several coagulation factors. Aggregates of Aβ can activate coagulation factor XII (FXII) to initiate blood clotting, and can increase fibrin density and resistance to fibrinolysis. CAA deposits contain coagulation factors, and antiplatelet therapy reduces accumulation of CAA deposits and improves cognitive function in mice. Aβ forms stable complexes with FXIIIa and colocalizes with FXIIIa and fibrin in CAA deposits of AD patients.

[0615] Transgenic mice with human APP751 bearing the E693Q mutation under the murine Thy1 promoter is a model for CAA. This transgenic mouse line bears a mutation that was determined to cause hereditary cerebral hemorrhage with amyloidosis-Dutch type, a rare autosomal dominant disorder characterized by CAA, strokes, and dementia (APPDutch). These mice have an increased Aβ40/Aβ42 ratio, but parenchymal amyloid plaques are not observed. Instead, mice develop extensive vascular Aβ deposition starting at 22 to 24 months of age, and appearing first in leptomeningeal vessels followed by cortical vessels. This leads to smooth muscle cell degeneration, hemorrhages, and neuroinflammation. The mice develop robust microgliosis immediately adjacent to amyloid-laden vessels, and widespread activation of astrocytes in neocortical regions affected by CAA. Female mice have earlier onset of amyloid deposition.

[0616] APPDutch mice are used for in vivo study. Mice will undergo behavior tests and compared to age matched control mice. Pre-dose plasma/serum is collected for different biomarker assays. Dose range therapeutic efficacy of the anti-Gal3 antibodies disclosed herein are conducted. Briefly, different doses of anti-Gal3 antibodies are administered i.p. twice in a week, with a total of 8 doses administered. After dosing, mice will undergo behavior tests. Mice are sacrificed, and blood, CSF, brain, and other organs are collected for quantifying various biomarkers, histology, and biochemical characterization.

[0617] In AD and CAA, Gal3 expression levels are increased. Gal3 intrinsically promotes aggregation of various amyloid proteins like Aβ and non-amyloid proteins like fibrin during the disease stage. Anti-Gal3 antibodies degrade these oligomers in a dose dependent manner in the case of Aβ oligomers, and also degrades fibrin oligomers. Four doses of exemplary anti-Gal3 antibody mTB001 not only significantly reduces the pathological hallmarks of AD but also reduces inflammatory markers such as activated microglia and astrocytes. Improvement of CAA may also be assessed through biomarkers such as ApoE, clusterin, and sushi repeat-containing protein X-linked 1 (SRPX1).

### Example 5: Anti-Gal3 Antibodies as Therapeutics for Atherosclerosis

[0618] Atherosclerosis is marked by macrophage accumulation, activation and differentiation into cholesterol-laden “foam cells” within atherosclerotic vascular walls, indicating that atherosclerosis can be considered a chronic inflammatory disease. Gal3 levels are elevated in human atherosclerosis plaques and in preclinical animal models of hypercholesterolemia and stenosis (ApoE-/- mice). Moreover, Gal3 is increased in the unstable parts of patient plaques, and human monocytes treated with Gal3 show increased chemotaxis and activation. Within the plaque, Gal3 is mainly distributed in macrophages and foam cells (rarely in vascular smooth muscle cells), and its expression increases with plaque severity (i.e., extent and inflammation) in human patients and ApoE-/- mice. Atherosclerosis is also associated with and/or may be a cause of thrombosis and thromboembolism, carotid artery disease, coronary artery disease, peripheral artery disease, atherosclerosis-associated heart failure and myocardial infarction, chronic kidney disease, and stroke.

[0619] Gal3 activates secretion of proinflammatory cytokines in myeloid cell lines, and anti-Gal3 antibodies can prevent and/or reduce such effect. The Gal3 inhibitor MCP (modified citrus pectin) inhibits the adhesion of leukocytes to endothelial cells and reduces the size of atherosclerotic lesion areas in ApoE-/- mice.

### Example 6: Anti-Gal3 Antibodies Prevent Gal3-induced Inflammatory Cytokine Expression in Monocyte and Neutrophil Cell Lines

[0620] The effect of Gal3 on enhancing cytokine expression in neutrophils and the ability to block this effect by anti-Gal3 antibodies were assessed. HL60 promyeloblast cells (ATCC) were maintained in IMDM with 20% heat-inactivated FBS (Gibco) and 1x Penicillin-Streptomycin (Gibco). HL60 cells were differentiated to Neutrophil-like cells with 1.3% DMSO for 96 hours. Differentiated HL60 cells were washed with FBS-free IMDM media to be used for stimulation at a later time. In 96-well U bottom plates, 50 µL of 4 µM Gal3 (4X, which will result in a 1X (1 µM) final concentration after other component volumes are added) was added to the plates as the highest concentration, followed by a 1:2 serial dilution in FBS-free IMDM media to establish a dose response curve (0, 0.015625, 0.03125, 0.0625, 0.125, t0.25, 0.5, or 1 µM final concentration of Gal3). 50 µL of each Gal3 dilution was then incubated with 50 µL of exemplary anti-Gal3 antibodies or MOPC21 isotype control (at concentrations of 0, 0.0625, 0.125, 0.25, 0.5, 1, 2, or 4 µM final concentration of antibody) for 30 min at 37° C. After that, 0.4 ng/mL of LPS (4X, which will result in a 1X (0.1 ng/mL) final concentration with the other component volumes) was added to every well in the plates and incubated for 30 min at 37° C. Finally, 50 µL of differentiated HL-60 cells (a total of 100k cells) were added to every well in the plates and incubated for 4 hours at 37° C. At the end of the incubation, plates were centrifuged for 5 min at 1000 rpm and supernatant was removed to measure TNF-α, IL-6, and IL-8 by ELISA.

[0621] Tested anti-Gal3 antibodies TB001 and TB006 were shown to have a dose-dependent effect in reducing TNF-α, IL-6, and IL-8 secretion of the HL60 cells during LPS stimulation (FIG. 34). MOPC21 isotype control had no effect on cytokine secretion. Some nonspecific cytokine stimulation may be observed due to Fc domains on the antibodies.

[0622] The effect of Gal3 on enhancing cytokine expression in monocytes and the ability to block this effect by anti-Gal3 antibodies was also assessed. THP-1 Monocyte-like cells (ATCC) were maintained in RPMI-1640 media with 10% heat-inactivated FBS and 1X Penicillin-Streptomycin. THP-1 cells were washed once with FBS-free RPMI-1640 media to be used for stimulation at a later time. In 96-well U bottom plates, 50 µL of 4 µM of Gal3 (4X 1 µM) was added to the plates as the highest concentration, followed with a 1:2 serial dilution in FBS-free RPMI-1640 media to establish a dose response curve. 50 µL of 4 µM Gal3 was then incubated with 50 µL of exemplary anti-Gal3 antibodies or MOPC21 isotype control (at concentrations of 0, 0.0625, 0.125, 0.25, 0.5, 1, 2, or 4 µM final concentration of antibody) for 30 min at 37° C. After that, 0.4 ng/mL of LPS (4× 0.1 ng/mL) was added to every well in the plates and incubated for 30 min at 37° C. Finally, 50 µL of THP-1 cells (a total of 100k cells) were added to every well and incubated for 6 or 24 hours at 37° C. At the end of the incubation, plates were centrifuged for 5 min at 1000 rpm and supernatant was removed to measure TNF-α, IL-6, and IL-8 by ELISA.

[0623] Tested anti-Gal3 antibodies TB001 and TB006 were shown to have a dose-dependent effect in reducing TNF-α, IL-6, and IL-8 secretion of the THP-1 cells during LPS stimulation (FIGS. 35A-C). MOPC21 isotype control had no effect on cytokine secretion. Some nonspecific cytokine stimulation may be observed due to Fc domains on the antibodies.

[0624] In summary, anti-Gal3 antibody treatment is able to inhibit proinflammatory activity of immune cells such as neutrophils and monocytes.

### Example 7: Binning and Peptide Binding Assay of Additional Exemplary Anti-Gal3 Antibodies

[0625] A large-scale antibody binning assay was performed on exemplary anti-Gal3 antibodies.

[0626] The epitope binning assay was done in a sandwich format on the high-throughput SPR-based Carterra LSA unit (CarterraBio, Salt Lake City, UT). First, the purified antibodies were diluted to 10 µg/ml concentration in 10 mM NaOAc (pH 5.0) and then were covalently coupled via amine group to HC200M chip activated by EDC and S-NHS to immobilize antibodies to different positions of a 384-spot array. One hundred thirty-eight binning cycles were run on the array of immobilized antibodies. In each cycle, first, human Gal3 (AcroBio GA3-H5129) was injected over the entire array to bind to different antibodies (primary antibody), followed by one antibody (secondary antibody) selected among the panel of 150 anti-GAL3 antibodies tested. At the end of each cycle, the array was regenerated by 10 mM Glycine (pH 2.0) to remove bound antigen and secondary antibody from the array. The data analysis was done using the Epitope software by CarterraBio.

[0627] Binning results are shown in FIG. 10. In total, 49 distinct bins were identified for 120 anti-GAL3 antibodies that demonstrate binding to hGAL3 (30 antibodies out of 150 tested did not bind hGAL3 when immobilized on HC200M chip and were thus excluded from further analysis). Antibodies that strongly blocked the association of GAL3 and APP695 belonged to a number of distinct bins defined below. This highlights the utility of these bins as predictors of GAL3 binding activity.

[0628] Clones IMT001 (TB001) and F847C.21H6 exhibited mutual competitive binding for Gal3, but did not prevent binding of the rest of the clones, thus defining bin 1. Clones IMT006 (TB006), 19B5.2E6, 20H5.A3, 23H9.2E4, 2D10.2B2 exhibited mutual competitive binding for Gal3, but did not prevent binding of the rest of the clones, thus defining bin 3. Clones 20D11.2C6 and 15G7.2A7 exhibited mutual competitive binding for Gal3, but did not prevent binding of the rest of the clones, thus defining bin 5. Clones 3B11.2G2, 13A12.2E5 exhibited mutual competitive binding for Gal3, but did not prevent binding of the rest of the clones, thus defining bin 7. Clones 14H10.2C9, 15F10.2D6, 7D8.2D8, F846TC.14E4, F846TC.7F10, F849C.8D10 exhibited mutual competitive binding for Gal3, but did not prevent binding of the rest of the clones, thus defining bin 8. Clones 12G5.D7 and 849.2D7 exhibited mutual competitive binding for Gal3, but did not prevent binding of the rest of the clones, thus defining bin 10. Clones 24D12.2H9, 6B3.2D3, 849.1D2 exhibited mutual competitive binding for Gal3, but did not prevent binding of the rest of the clones, thus defining bin 11. Clones 13G4.2F8 and 9H2.2H10 exhibited mutual competitive binding for Gal3, but did not prevent binding of the rest of the clones, thus defining bin 12. Clones F846C.1B2, F846C.1F5, F846C.1H12, F846C.2H3, F846TC.16B5 exhibited mutual competitive binding for Gal3, but did not prevent binding of the rest of the clones, thus defining bin 17. In addition, clone 849.5H1 did not compete for binding to Gal3 with other antibodies tested, therefore defining bin 21.

[0629] Antibodies 847.12C4, 847.15D12, 847.15H11, 847.20H7, and 847.27B9 exhibited mutual competitive binding and competed with binding with the commercially available anti-Gal3 antibody B2C10 for hGAL3, but did not prevent binding of the rest of the clones, thus defining bin “B2C10”. B2C10 has been epitope mapped to bind to the first 18 amino acids of Gal3. Antibodies 847.10C9, 847.11D6, 847.13E2-mH0mL1, 847.13E2-mH0mL2, 847.16D10, 847.23F11, 847.28D1, and 847.3B3 exhibited mutual competitive binding to the C-terminal carbohydrate-recognition domain (CRD), but did not prevent binding of the rest of the clones, thus defining bin “CRD”. Antibodies F846TC.14A2, F847C.10B9, F847C.11B1, F847C.12F12, F847C.4B10, F849C.8H3, 849.8D12, F846C.1H5, 847.14H4, F847C.26F5, 849.2F12, were either not tested (“n/a”) or not assigned (“Unassigned”) to a bin. Antibodies 846.2B11, 846T.4C9, 847.15F9, 847.21B11, 847.2B8, 847.4D3, 849.4F12, and 849.4B2 were determined to not bind to hGAL3 under the conditions tested.

[0630] Gal3 peptide binding activity of additional exemplary anti-Gal3 antibodies was assessed with the same peptides as described in FIG. 2 (SEQ ID NOs: 3-26). Human Gal3 peptides (LifeTein, custom order) and human Gal3 proteins (R&D Systems, 8259-GA; TrueBinding, QCB200349) were diluted in PBS (Corning, 21-030-CM) to concentrations of at least 100 µg/mL (peptides) or 1 µg/mL (proteins), and added to the wells of several 96-well ELISA plates (Thermo Fisher, 44-2404-21). After incubating the plates at 4° C. overnight, the plates were washed three times with PBST (PBS with 0.05% Tween 20 [VWR, 0777]). The plates were then blocked for an hour with 2% BSA (EMD Millipore, 126609) in PBST at room temperature with gentle rocking. Thereafter, the 2% BSA in PBST was discarded and Gal3-binding antibodies (reformatted hIgG4 [S228P]) were diluted in 2% BSA in PBST to concentrations of 5 µg/mL and added to the wells. The plates were incubated for an hour at room temperature with gentle rocking and then washed three times with PBST. Afterwards, Peroxidase AffiniPure F(ab′)₂ Fragment Goat Anti-Human IgG (H+L) polyclonal antibody (Jackson ImmunoResearch, 109-036-003), was diluted in 2% BSA in PBST (1:4000) and added to the wells. The plates were incubated for 1 hour at room temperature with gentle rocking and then washed three times with PBST. TMB substrate (Thermo Scientific, 34029) was then added to each well. The reaction was stopped with 1 M HCl (JT Baker, 5620-02) and read using a plate reader (Molecular Devices) at absorbance of 450 nm.

[0631] Peptide binding results are depicted in FIG. 10. Peptide numbering is based on FIG. 2. Binding of Gal3-binding antibodies to the peptide array was observed at multiple locations, with the majority of binding observed in peptides 1-8 and some binding to peptides 13 and 17.

[0632] 13 separate Gal3-binding antibodies (19B5.2E6, 20D11.2C6, 20H5.A3, 23H9.2E4, F846C.1H5, F846TC.14A2, F846TC.7F10, F847C.10B9, F847C.12F12, F847C.26F5, F847C.4B10, 15FG7.2A7, 849.1D2) all bound peptide 1 of Gal3, corresponding to amino acids ADNFSLHDALSGSGNPNPQG (SEQ ID NO: 3) of Gal3.

[0633] 7 separate Gal3-binding antibodies (15F10.2D6, 7D8.2D8, F846TC.14E4, F849C.8D10, F849C.8H3, 847.12C4, 847.10C9) bound peptide 2 of Gal3, corresponding to amino acids SGSGNPNPQGWPGAWGNQPA (SEQ ID NO: 4) of Gal3.

[0634] 5 separate Gal3-binding antibodies (15F10.2D6, 7D8.2D8, F849C.8D10, 847.12C4, 847.10C9) bound peptide 3 of Gal3, corresponding to amino acids WPGAWGNQPAGAGGYPGASY (SEQ ID NO: 5) of Gal3.

[0635] 4 separate Gal3-binding antibodies (13A12.2E5, 15F10.2D6, 3B11.2G2, 847.27B9) bound peptide 4 of Gal3, corresponding to amino acids GAGGYPGASYPGAYPGQAPP (SEQ ID NO: 6) of Gal3.

[0636] 4 separate Gal3-binding antibodies (TB001 (IMT001), F846C.1B2, F846C.1H12, F847C.21H6) bound peptide 5 of Gal3, corresponding to amino acids PGAYPGQAPPGAYPGQAPPG (SEQ ID NO: 7) of Gal3.

[0637] 15 separate Gal3-binding antibodies (TB001 (IMT001), TB006 (IMT006), 13A12.2E5, 14H10.2C9, 23H9.2E4, 2D10.2B2, 3B11.2G2, F846C.1B2, F846C.1F5, F846C.1H12, F846C.2H3, F846TC.16B5, F847C.21H6, 15FG7.2A7, 847.28D1) bound peptide 6 of Gal3, corresponding to amino acids GAYPGQAPPGAYPGAPGAYP (SEQ ID NO: 8) of Gal3.

[0638] 13 separate Gal3-binding antibodies (14H10.2C9, 19B5.2E6, 20D11.2C6, 20H5.A3, 23H9.2E4, F846C.1B2, F846TC.14A2, F847C.10B9, F847C.12F12, F847C.26F5, 15FG7.2A7, 9H2.2H10, 847.14H4) all bound peptide 7 of Gal3, corresponding to amino acids AYPGAPGAYPGAPAPGVYPG (SEQ ID NO: 9) of Gal3.

[0639] 4 separate Gal3-binding antibodies (20D11.2C6, 23H9.2E4, F846TC.14A2, 15G7.2A7) all bound peptide 8 of Gal3, corresponding to amino acids GAPAPGVYPGPPSGPGAYPS (SEQ ID NO: 10) of Gal3.

[0640] 2 separate Gal3-binding antibodies (847.12C4, 847.10C9) bound peptide 9 of Gal3, corresponding to amino acids PPSGPGAYPSSGQPSATGAY (SEQ ID NO: 11) of Gal3.

[0641] 3 separate Gal3-binding antibodies (15G7.2A7, 847.12C4, 847.10C9) all bound peptide 10 of Gal3, corresponding to amino acids SGQPSATGAYPATGPYGAPA (SEQ ID NO: 12) of Gal3.

[0642] 3 separate Gal3-binding antibodies (847.13E2-mH0mL1, 847.13E2-mH0mL2, 847.23F11) all bound peptide 13 of Gal3, corresponding to amino acids LPGGVVPRMLITILGTVKPN (SEQ ID NO: 15) of Gal3.

[0643] 13 separate Gal3-binding antibodies (7D8.2D8, F846C.1F5, F846C.1H12, F846C.2H3, F846TC.16B5, F847C.11B1, F849C.8H3, 849.1D2, 847.15D12, 847.13E2-mH0mL1, 847.13E2-mH0mL2, 847.23F11, 847.3B3) all bound peptide 17, corresponding to amino acids RFNENNRRVIVCNTKLDNNW (SEQ ID NO: 19) of Gal3.

[0644] 19 separate Gal-3 binding antibodies (849.2D7, 24D12.2H9, 6B3.2D3, 13G4.2F8, 849.5H1, 847.15H11, 847.20H7, 847.11D6, 847.16D10, 849.8D12, 846.2B11, 846T.4C9, 847.15F9, 847.21B11, 847.2B8, 847.4D3, 849.4F12, 849.4B2, 849.2F12) were not found to bind to any of the tested Gal3 peptides under the conditions used in this Example.

[0645] As illustrated in FIG. 2, peptides 4, 5, 6, and 7 share repeated amino acid sequences comprised of proline-glycine (PG) and tyrosine-proline-glycine (YPG), indicating a common feature that may explain the ability of Gal3-targeted antibodies to bind to multiple Gal3 peptides. Further, the amino acid sequence glycine-x-tyrosine-proline-glycine (GxYPG), where x may be the amino acids alanine (A), glycine (G), or valine (V), is shared in peptides 4, 6, and 7, each of which possess two such sequences separated by 3 amino acids. Accordingly, the presence of two GxYPG sequences in close apposition is likely predictive of the ability to bind Gal3-targeted antibodies. Additionally, the Grantham distance of alanine, glycine, and valine is Ala-Val: 64, Ala-Gly: 60, Val-Gly: 109, thereby predicting that amino acids with similarly low Grantham distances may similarly be able to substitute at the variable region, including proline and threonine.

### Example 8. Humanized Anti-Gal3 Antibodies Have High Affinity for Gal3 of Different Species

[0646] Cross reactivity of exemplary anti-Gal3 antibodies TB001 and TB006 to human or mouse Gal3 were tested. Kinetics experiments were performed on a Carterra LSA at 25° C. An HC30M chip was immobilized with recombinant Protein A/G. TB001 (IMT001; IMT001-4), TB006 (IMT006; IMT006-5), and a negative control antibody Synagis (10 µg/mL each diluted in HBSTE buffer (HEPES based saline with Tween-20 and EDTA) with 0.5 mg/mL BSA) were captured onto different spots in the 384-spot array. Then, a dilution series of Gal3 (2, 4, 8, 16, 32, 64, and 128 nM) in HBSTE with 0.5 mg/mL BSA was injected to the whole array for 300 seconds to allow association followed by dissociation for 240 seconds. The kinetics constants were calculated by the software NextGenKIT.

[0647] Separately, the affinity kinetics of TB001 and TB006 to cynomolgus Gal3 (cynoGal3) was measured on a Biacore T200 at 25° C. A CM5 chip coated with anti-mouse Fc/anti-human Fc mixture was used to load purified antibody TB001 or TB006 at 10 µg/mL in HBS-EP+ buffer (HEPES based saline with polysorbate 20 and EDTA) with 0.5 mg/mL BSA for 180 seconds, and then a dilution series of His-enterokinase cleavage site (EK)-cynoGal3 (TrueBinding in-house antigen) in HBS-EP+ with 0.5 mg/mL BSA starting from 100 nM, 1:2 dilution for 7 points for 200 seconds, followed by dissociation for 300 seconds. In each cycle, duplicates were made by loading the same antibody to flow cells FC2 and FC4, and then analyte was flowed to all 4 flow cells. The detection was done pairwise, FC2-FC1 and FC4-FC3, to subtract non-specific binding of analyte to the surface. A cycle of 0 nM analyte was run prior to a dilution series of analyte. The 0 nM raw data were subtracted from each non-zero concentration data to minimize machine drifts. The data were analyzed by Biacore Evaluation software version 2.0. The binding affinities were characterized by fitting the kinetic sensograms to a monovalent binding model (1:1 binding).

[0648] Separately, the affinity kinetics of TB001 and TB006 to rat Gal3 was measured on a Biacore T200 at 25° C. A CM5 chip was coated with goat anti-human Fc antibody on all 4 flow cells, and was used to load purified antibodies TB001, TB006, and Synagis (negative control), which all use an hIgG4 backbone. In each sample cycle, duplicates of the same antibody in HBS-EP+ with 0.5 mg/mL BSA at 10 µg/mL were captured to FC2 and FC4 by flowing at 10.0 µL/min for 120 seconds, and then diluted His-EK-ratGal3 in HBS-EP+ with 0.5 mg/mL BSA was injected to all 4 flow cells at 30.0 µL/min for 180 seconds, followed by dissociation for 240 seconds. A dilution series of His-EK-ratGal3 started from 300 nM, and was 1:3 diluted for 6 points. FC1 and FC3 were used as reference flow cells, and their sensograms were subtracted from FC2 and FC4 respectively to reduce non-specific binding background. Also, an additional sample cycle at 0 nM analyte was run, and its sensogram was subtracted from those of non-zero nM cycles to address machine drifts and bulk shifts. The data were analyzed by Biacore Evaluation software version 2.0. The binding affinities were characterized by fitting the kinetic sensograms to a monovalent binding model (1:1 binding).

[0649] The affinity of Gal3 binding to antibody was determined by acquiring real time Ligand:Analyte binding kinetics data and fitting the data with a 1:1 monovalent binding model. The kinetic evaluation procedure determines association and dissociation constants by fitting the experimental data to a 1:1 interaction model between analyte A and ligand B:

[0650] Kₐ: A+B → AB; and K_{d}: A+B ← AB, where Kₐ is the association rate constant (M⁻¹s⁻¹) and the K_{d} is the dissociation rate constant (s⁻¹).

[0651] The net rate of complex formation during injection is given by:

$$\text{d} \left[\text{AB}\right] / \text{dt} \text{=} {\text{K}}_{\text{a}} \left[\text{A}\right] \left[\text{B}\right] - {\text{K}}_{\text{d}} \left[\text{AB}\right]$$

and the rate of dissociation after the end of the injection is:

$$\text{d} \left[\text{AB}\right] / \text{dt} \text{=} - {\text{K}}_{\text{d}} \left[\text{AB}\right] .$$

[0652] The affinity KD is the result of K_{d} divided by Kₐ.

[0653] Humanized TB001 (IMT001) and TB006 (IMT006a), which were derived from mouse mAbs, both have high affinity for human (IMT001: 3.6 nM, IMT006a: 8.9 nM) and cynomolgus (IMT001: 8.9 nM, IMT006a: 5.1 nM) Gal3 (FIG. 11B). IMT001 also has high affinity for mouse Gal3 (IMT001: 2.3 nM, IMT006a: 40000 nM) and rat Gal3 (IMT001: 14 nM, IMT006a: undetected).

### Example 9: Anti-Gal3 Antibodies for Use in the Treatment of Stroke or Cerebral Amyloid Angiopathy

[0654] Patients present with stroke, cerebral amyloid angiopathy or symptoms thereof. The stroke may be an ischemic stroke, thrombotic stroke, embolic stroke, transient ischemic attack, hemorrhagic stroke, intracerebral hemorrhage, or subarachnoid hemorrhage. The cerebral amyloid angiopathy may be associated with the stroke. One or more anti-Gal3 antibodies or binding fragments thereof disclosed herein are administered to the patients enterally, orally, intranasally, parenterally, intracranially, subcutaneously, intramuscularly, intradermally, or intravenously.

[0655] The anti-Gal3 antibodies or binding fragments thereof are administered as doses in at an amount of 1000 mg (or in the alternative: 0.1, 1, 10, 100, 1000 ng, or 1, 10, 50, 100, 200, 300, 400, 500, 600, 700, 800, 900, 1000 µg, or 1, 10, 100, 200, 300, 400, 500, 600, 700, 800, 900, 1100, 1200, 1300, 1400, 1500, 1600, 1700, 1800, 1900, 2000 mg, or any amount within a range defined by any two of the aforementioned amounts, or any other amount appropriate for optimal efficacy in humans). Multiple doses may be administered as part of a treatment schedule. For example, 5 doses (or in the alternative: 2, 3, 4, 6, 7, 9, 8, 10, 11, 12, 13, 14, 15, or 16 doses) may be administered. The doses are administered every 1 day (or in the alternative: every 2, 3, 4, 5, 6, 7, 8, 9, 10, 11, 12, 24, 36, or 48 days or any time within a range defined by any two of the aforementioned times). The doses may be administered for a combined total of 5000 mg (or in the alternative: 1000, 2000, 3000, 4000, 6000, 7000, 8000, 9000, or 10000 mg) to each patient.

[0656] A treatment of the stroke, cerebral amyloid angiopathy, or symptoms thereof is observed in the patients following administration of the anti-Gal3 antibodies or binding fragments thereof. Administration of the anti-Gal3 antibodies or binding fragments may be performed in conjunction with another therapy for stroke or cerebral amyloid angiopathy, for example, thrombolytics, tissue plasminogen activator (tPA), alteplase, reteplase, tenecteplase, desmoteplase, anticoagulants, ACE inhibitors, antihypertensives, nicardipine, or surgery, or any combination thereof.

### Example 10: Anti-Gal3 Antibodies for Use in the Treatment of Traumatic Brain Injury

[0657] Patients present with traumatic brain injury or symptoms thereof. One or more anti-Gal3 antibodies or binding fragments thereof disclosed herein are administered to the patients enterally, orally, intranasally, parenterally, intracranially, subcutaneously, intramuscularly, intradermally, or intravenously.

[0658] The anti-Gal3 antibodies or binding fragments thereof are administered as doses in at an amount of 1000 mg (or in the alternative: 0.1, 1, 10, 100, 1000 ng, or 1, 10, 50, 100, 200, 300, 400, 500, 600, 700, 800, 900, 1000 µg, or 1, 10, 100, 200, 300, 400, 500, 600, 700, 800, 900, 1100, 1200, 1300, 1400, 1500, 1600, 1700, 1800, 1900, 2000 mg, or any amount within a range defined by any two of the aforementioned amounts, or any other amount appropriate for optimal efficacy in humans). Multiple doses may be administered as part of a treatment schedule. For example, 5 doses (or in the alternative: 2, 3, 4, 6, 7, 9, 8, 10, 11, 12, 13, 14, 15, or 16 doses) may be administered. The doses are administered every 1 day (or in the alternative: every 2, 3, 4, 5, 6, 7, 8, 9, 10, 11, 12, 24, 36, or 48 days or any time within a range defined by any two of the aforementioned times). The doses may be administered for a combined total of 5000 mg (or in the alternative: 1000, 2000, 3000, 4000, 6000, 7000, 8000, 9000, or 10000 mg) to each patient.

[0659] A treatment of the traumatic brain injury or symptoms thereof is observed in the patients following administration of the anti-Gal3 antibodies or binding fragments thereof. Administration of the anti-Gal3 antibodies or binding fragments may be performed in conjunction with another therapy for TBI, for example, levodopa, bromocriptine, NMDA receptor antagonists, amantadine, memantine, cholinesterase inhibitors, tacrine, rivastigmine, galantamine, donepezil, surgery, or any combination thereof.

### Example 11: Anti-Gal3 Antibodies for Use in the Treatment of Fibrin Disorders

[0660] Patients present with a disorder associated with fibrin oligomerization, or symptoms thereof. For example, the patient may present with or be at risk for one or more of atherosclerosis, thrombosis, thromboembolism, carotid artery disease, coronary artery disease, peripheral artery disease, myocardial infarction, heart failure, heart attack, hypertension, chronic kidney disease, stroke, or other cardiovascular diseases. In some embodiments, the patients may present with atherosclerosis, which may be associated with one or more of these other diseases. One or more anti-Gal3 antibodies or binding fragments thereof disclosed herein are administered to the patients enterally, orally, intranasally, parenterally, intracranially, subcutaneously, intramuscularly, intradermally, or intravenously.

[0661] The anti-Gal3 antibodies or binding fragments thereof are administered as doses in at an amount of 1000 mg (or in the alternative: 0.1, 1, 10, 100, 1000 ng, or 1, 10, 50, 100, 200, 300, 400, 500, 600, 700, 800, 900, 1000 µg, or 1, 10, 100, 200, 300, 400, 500, 600, 700, 800, 900, 1100, 1200, 1300, 1400, 1500, 1600, 1700, 1800, 1900, 2000 mg, or any amount within a range defined by any two of the aforementioned amounts, or any other amount appropriate for optimal efficacy in humans). Multiple doses may be administered as part of a treatment schedule. For example, 5 doses (or in the alternative: 2, 3, 4, 6, 7, 8, 9, 10, 11, 12, 13, 14, 15, or 16 doses) may be administered. The doses are administered every 1 day (or in the alternative: every 2, 3, 4, 5, 6, 7, 8, 9, 10, 11, 12, 24, 36, or 48 days or any time within a range defined by any two of the aforementioned times). The doses may be administered for a combined total of 5000 mg (or in the alternative: 1000, 2000, 3000, 4000, 6000, 7000, 8000, 9000, or 10000 mg) to each patient.

[0662] A treatment of the disorder associated with fibrin oligomerization or symptoms thereof is observed in the patients following administration of the anti-Gal3 antibodies or binding fragments thereof. Administration of the anti-Gal3 antibodies or binding fragments may be performed in conjunction with another therapy for disorders associated with fibrin oligomerization or cardiovascular diseases, for example, anti-clotting agents (e.g. aspirin), statins, antihypertensives, diuretics, calcium channel blockers, ACE inhibitors, angiotensin II receptor antagonists, adrenergic receptor antagonists, vasodilators, renin inhibitors, aldosterone receptor antagonists, endothelium receptor blockers, or surgery, such as vascular bypass surgery, percutaneous coronary intervention, coronary artery bypass graft, carotid endarterectomy, or angioplasty.

### Example 12: Clinical Study of Efficacy Safety, and Pharmacokinetics of TB006 in Patients With Acute Ischemic Stroke

[0663] Stroke is a leading cause of death and disability. In 2018, more than 795,000 people in the US experienced a stroke event and stroke related costs exceed $46 billion. Stroke reduces mobility in more than half of stroke survivors aged 65 and over. About 87% of all strokes are ischemic strokes in which blood flow to the brain is blocked. Nonetheless, IV thrombolysis with tPA and thrombectomy are still the only approved treatments for AIS. Due to limitations in tPA dosing, especially a narrow therapeutic window, only < 5% of hospitalized patients for stroke receive tPA. Researchers have been desperately trying to identify novel treatment strategies beyond recanalization, i.e., neuroprotective and neurorestorative treatments. In the last few decades, more than 1,000 acute stroke treatments have been tested successfully in the preclinical lab, with nearly 100% failure in large clinical trials. Therefore, there is a huge need to develop therapies using different approaches that would be accessible to a greater number of patients for the treatment of acute stroke.

[0664] Activity in stroke research peaked in the mid-1990s to the mid-2000s. The vast majority of experimental drugs developed to treat AIS have been classified as either thrombolytics or neuroprotectants. The former group encompasses compounds that restore blood flow, while the latter term covers drugs that act to preserve neurons. One of the limitations with these approaches, even if patients gain access to them and they are successful, is that neuronal damage is done. After the acute period, stroke survivors face a myriad of challenges, including, but not limited to, hemiparesis and aphasia. While evidence supports the utility of rehabilitation efforts after acute stroke, complete neurological and physical recovery is rarely complete. The profound vacuum in this field is particularly disappointing because evidence suggests that functional recovery is possible. Innovative approaches to enhance the body’s endogenous regenerative abilities remain an opportunity for improvement.

[0665] Galectin-3 levels are elevated for up to 2 months following brain ischemia in animals. The primary source of Gal-3 in the acute ischemic brain tissue is the microglia. Galectin-3 expression leads to infiltration of inflammatory cells, and then the production of reactive oxygen species. Reduction or inhibition of Gal-3 contributes to the revascularization of previously ischemic tissue and improvement of post stroke angiogenesis and plays an important role in remyelination and recovery from neuronal loss. Therefore, compounds that inhibit Gal-3 may contribute to neuro-restoration. In addition, the benefits of blocking Gal-3 are evident if the treatment is started 8 days after the stroke event.

[0666] Anti-Gal3 antibodies can be used as therapeutic agents for acute ischemic stroke (AIS) by neutralizing Gal3, which regulates activation of astrocytes and microglia. Activation of these cells, which occurs in stroke, leads to neuronal damage and infiltration of other inflammatory factors compounding the cascade of functional decline. TB006 has been shown in in vitro models to reduce activated astrocytes and microglia, and has demonstrated improvement in in vivo models of stroke in both locomotor and cognitive functioning. This evidence supports clinical testing in an AIS setting. The preclinical safety profile of TB006 further supports the clinical investigation of TB006.

[0667] This example represents a Phase 2 study in patients with a mild to moderate AIS event that will evaluate the efficacy, safety and tolerability, and pharmacokinetic (PK) profile of TB006, administered once weekly (QW) as an intravenous (IV) infusion over 1 hour. This example will commence after the safety, tolerability, and PK of single TB006 doses up to 5,000 mg have been established in healthy volunteers. The primary efficacy endpoint will be the National Institutes of Health Stroke Scale (NIHSS), and the primary efficacy assessment will be the change from Baseline in the active treatment group versus placebo. Other efficacy measures include the modified Rankin Scale (mRS), Fugl-Meyer Assessment (FMA), and Montreal Cognitive Assessment (MoCA). A variety of assessments, including physical exams, vital signs, electrocardiograms (ECGs), and clinical labs, will be used to assess safety.

[0668] Patients with mild to moderate ischemic stroke are eligible to participate if all eligibility criteria are met and they are able to receive their first dose of treatment within 7 days of the documented stroke event. Patients may be enrolled into the example trial while either in an inpatient facility or following discharge; likewise, patients may receive their 5 weekly doses of drug while in an inpatient facility or following discharge. All patients will be followed up for safety, efficacy, and PK assessments through Day 104 of the example.

[0669] This example will evaluate the efficacy and safety of TB006 in patients with an AIS event with 1 month of treatment. The total example study duration of each patient will be up to approximately 15 weeks. This example has a parallel-group design with 2 treatment groups: TB006 and placebo. 112 patients are randomized in a 1:1 ratio (56 patients per group) to receive either treatment. Doses will be administered QW for a total of 5 doses (Days 1, 8, 15, 22, 29). The dose of TB006 is 1,000 mg QW (total of 5,000 mg over 1 month). This example will commence after the safety and tolerability of a single 5,000 mg dose has been established in a single ascending dose (SAD) study.

[0670] Patients with an ischemic stroke event, as documented with a computed tomography (CT) scan or magnetic resonance imaging (MRI), with a Baseline NIHSS total score of 7 to 21 (inclusive), are eligible to participate. Patients must be randomized and dosed within 7 days of their known documented AIS event. The last known awake time will be used as the stroke onset time for patients whose stroke occurred during sleep. They may be either hospitalized or have been discharged at Baseline. Despite the 7-day window from time of stroke onset to first dose of administration, every effort should be made to administer the first dose as early as possible. Hospitalized patients may be dosed, monitored and evaluated initially as inpatients; following discharge, patients will be followed on an outpatient basis for dose administration (if any remain), and all follow-up assessments through Day 104. Patients may receive standard of care treatments for ischemic stroke, including the administration of tissue plasminogen activator if they are eligible, throughout the trial.

[0671] All randomized patients will follow the dosing schedule, and efficacy and safety procedures through Day 104, and at early discontinuation (E/D) if necessary. Patients will return to the clinic on dosing days and on follow-up visit days following hospital discharge. If a patient reports adverse events (AEs), they may be required to return to the clinic (if they are outpatients) at discretion for additional assessments. All AEs must be followed to adequate resolution. Efficacy assessments include the NIHSS, mRS, FMA, and MoCA, and are conducted by trained and certified staff. TB006 infusions are administered IV over 1 hour. Doses may be prepared by either hospital or research site pharmacy staff.

### Inclusion Criteria

[0672] 1) Male and/or female 18 to 85 (inclusive) years of age at the time of signing the informed consent.

[0673] 2) Body mass index (BMI) between 18 and 40 kg/m², inclusive.

[0674] 3) Clinical diagnosis of AIS in anterior circulation, supported by acute brain CT or MRI consistent with the clinical diagnosis.

[0675] 4) Able to be randomized and dosed within 7 days of index stroke event. The last known awake time will be used for patients whose stroke occurred during sleep.

[0676] 5) National Institute of Health Stroke Scale total score of 7 to 21, inclusive.

[0677] 6) Participants or their legally authorized representative confirms that prior to index stroke event, no significant impairment in participant’s ability to perform Activities of Daily Living (ADL) without assistance.

[0678] 7) Patients may have received standard of care therapy including tPA, thrombectomy, mannitol, hypertonic saline, and other treatments per local guidelines.

[0679] 8) Contraceptive use by men or women should be consistent with local regulations regarding the methods of contraception for those participating in clinical studies.

[0680] a) Male subjects are eligible to participate if they agree to the following from the first day of dosing until at least 90 days after dosing: refrain from donating sperm, PLUS, either: be abstinent from heterosexual intercourse as their preferred and usual lifestyle (abstinent on a long term and persistent basis) and agree to remain abstinent unless partner is not a Woman of Childbearing Potential (WOCBP) OR must agree to use contraception/barrier.

[0681] b) Female subjects are eligible to participate if they are not pregnant or breastfeeding, and at least one of the following condition applies: is not a WOCBP, OR be abstinent from heterosexual intercourse as their preferred and usual lifestyle (abstinent on a long term and persistent basis) and agree to remain abstinent throughout the example study, OR is a WOCBP and using a contraceptive method that is highly effective (with a failure rate of < 1% per year), preferably with low user dependency from Baseline until completion of the example study, and agrees not to donate eggs (ova, oocytes) for the purpose of reproduction during this period. A WOCBP must have a negative highly sensitive pregnancy test (serum) prior to randomization.

[0682] 9) Patients or caregiver or legally authorized representative has the ability to understand the purpose and risks of the example study and provide signed and dated informed consent which includes compliance with the requirements and restrictions. Patients whose caregiver signs the informed consent must provide their assent.

### Exclusion Criteria

[0683] 1) Evidence of severe stroke on imaging (e.g., sulcal effacement or blurring of gray-white junction in greater than ⅓ of middle cerebral artery [MCA] territory, Alberta Stroke Program Early CT [ASPECT] score of 0 to 4 based on head CT, acute infarct volume on MRI diffusion weighted imaging ≥ 70 mL) based on acute imaging studies performed under the standard of care.

[0684] 2) Lacunar or isolated brainstem or cerebellar stroke based on clinical assessment and available acute imaging studies performed under the standard of care.

[0685] 3) Evidence of seizure at the onset of index stroke.

[0686] 4) Evidence of acute myocardial infarction (MI) at Baseline, including any of the following:
[0687] a) acute ST elevation MI,
[0688] b) acute decompensated heart failure, or New York Heart Association Class III/IV heart failure,
[0689] c) admission for an acute coronary syndrome, MI, cardiac arrest, or non-voluntary coronary intervention (percutaneous coronary intervention or coronary artery surgery) within the past 3 months,
[0690] d) QT interval corrected using Bazett’s formula (QTcB) > 520 msec.

[0691] 5) Evidence of acute intracranial or subarachnoid hemorrhage or evidence of active bleeding based on acute brain CT or MRI performed under the standard of care. However, petechial hemorrhages of ≤ 1 cm are not exclusionary.

[0692] 6) Symptoms are considered likely to resolve within the subsequent few hours (e.g. transient ischemic attack [TIA]).

[0693] 7) Known history prior to randomization of clinically significant medical conditions (other than current AIS) or any other reason, including any physical, psychological, or psychiatric condition that in the investigator’s opinion would compromise the safety or interfere with the participant’s participation in this example.

[0694] 8) Known medical history of repeated episodes of complex migraine. Participants of complex migraine, but with imaging conclusively demonstrating an AIS are still allowed.

[0695] 9) Subjects with, in the opinion of the investigator, a life expectancy of < 3 months not related to current event, or those unlikely to be compliant with example study procedures or follow-up visits.

[0696] 10) Any substances detected in the drug screen dipstick test at Baseline that, in the opinion of the investigator, cannot be adequately explained.

[0697] 11) Female who is pregnant, breastfeeding, or considering becoming pregnant during the example study or within 10 weeks after the last dose of drug.

[0698] 12) Active coronavirus disease (COVID-19) infection.

[0699] 13) Known recipient of any investigational product within 30 days or 5 half-lives of the drug (whichever is longer) prior to the first dose of drug. No current enrollment in another interventional clinical study, including behavioral interventional studies.

[0700] Summary of statistical considerations: Summary statistics will be reported by treatment group for efficacy endpoints (NIHSS total score, MoCA total score) and change from Baseline in each of these efficacy endpoints at each applicable visit. Unadjusted and adjusted mean treatment differences, along with the 95% CI of the change from Baseline in each efficacy endpoint at each applicable visit will also be reported. Adjusted mean treatment difference will be derived by using a mixed-effect model for repeated measures (MMRM) that includes the fixed-effects of treatment, visit (categorical covariate), treatment-by-visit interaction and Baseline score. An unstructured variance-covariance matrix might be used, where appropriate. Appropriate linear contrast will be used to compare the 2 treatment groups.

[0701] Baseline values will be taken as the most recent assessment prior to dosing, reported during screening and up to and including Day 1.

[0702] Primary Endpoint: The primary efficacy measure is the change in neurological function from Baseline in the NIHSS total score through Day 104. The primary analysis will determine whether there is a difference between the active treatment group and the placebo treatment group in mean change from Baseline up to Day 104 in the NIHSS total score, according to the methods noted above. Effect size will also be determined. The NIHSS is performed at Baseline, then at Days 15, 36, 64, and 104 following initial intervention (intervention or safety follow-up period).

[0703] For testing as the change from Baseline on the NIHSS, the adjusted mean treatment differences will be derived by using a MMRM that includes the fixed effects of treatment, visit (categorical covariate), treatment-by-visit interaction, and Baseline score. An unstructured variance-covariance matrix might be used, where appropriate. Appropriate linear contrast will be used to compare the 2 treatment groups.

[0704] Secondary Endpoint: For testing the proportion of patients with clinically significant improvement on the mRS (defined as a 1-point decrease) and NIHSS (defined as a 4-point decrease) on Day 36 (and sustained through Day 104) will be compared using a Mantel-Haenszel test.

[0705] Primary and secondary objectives and endpoints are described in Table 1. ADA = anti-drug antibody; AEs = adverse events; AIS = acute ischemic stroke; Cₘₐₓ = maximum concentration; C-SSRS = Columbia Suicide Severity Rating Score; C_{trough} = minimum concentration; ECG = electrocardiogram; FMA = Fugl-Meyer Assessment; MoCA = Montreal Cognitive Assessment; mRS = modified Rankin Scale; NIHSS = National Institutes of Health Stroke Scale; PK = pharmacokinetic(s); SAE = serious adverse event; t_{½} = time required to reduce by half the plasma concentration of the drug.

TABLE 1

Objectives and Endpoints for AIS Treatment

| | |
|---|---|
| Objectives | Endpoints |
| Primary Objective: To determine the clinical efficacy of TB006 in patients with AIS | • Change in neurological function from Baseline through Day 104 on the NIHSS |
| Secondary Objective: To determine the clinical efficacy of TB006 in patients with AIS | • The proportion of patients who demonstrate clinically significant improvement on the NIHSS (defined as a 4-point decrease) on Day 36 (and sustained through Day 104) |
| | • Change in neurological function from Baseline through Day 36 on the NIHSS |
| | • The proportion of patients who demonstrate clinically significant improvement on the mRS (defined as a 1-point decrease) on Day 36 (and sustained through Day 104) |
| | • Change in the total score on the FMA on Day 36 and Day 104 |
| | • Change in the total score on the MoCA on Day 36 and Day 104 |
| Secondary Objective: To determine the safety and tolerability of TB006 | Safety endpoints, including the incidence of AEs and SAEs, clinical laboratory parameters, vital signs, ECGs, C-SSRS, physical and neurological examinations, and ADA until Day 104 after the first TB006 dosing |
| Secondary Objective: To determine the PK following multiple doses of TB006 | PK parameters including, but not limited to, C_{trough}, Cₘₐₓ, and t_{½}. |

[0706] For testing the change from Baseline on the FMA total score and the MoCA total score, the adjusted mean treatment differences will be derived by using a MMRM that includes the fixed effects of treatment, visit (categorical covariate), treatment-by-visit interaction, and Baseline score. An unstructured variance-covariance matrix might be used, where appropriate. Appropriate linear contrast will be used to compare the 2 treatment groups. For the immunogenicity assessment, ADA results will be descriptively summarized.

[0707] Safety, PK and Other Data: Safety data will be summarized descriptively, including tables, listings and figures, as appropriate. Unless otherwise stated, descriptive summary statistics for continuous variables will include number (n), mean (i.e., arithmetic mean), standard deviation (SD), minimum, median and maximum. Descriptive statistics for categorical data will include frequency and percentages.

[0708] All AEs will be coded using the most recent version of Medical Dictionary for Regulatory Activities (MedDRA). The incidence of AEs will be summarized by system organ class (SOC) and preferred term (PT). Similarly, summaries will be produced for AEs by severity, serious AEs (SAEs), treatment related AEs, and AEs leading to discontinuation. AEs are collected from the first dose of drug; thus all AEs are considered treatment-emergent AEs.

[0709] The ECG results will be presented by visit, summarizing the continuous measurements based on the average of triplicate values, including QT, QTc, QRS, RR, PR intervals, as well as change from Baseline values, and clinically significant changes in heart rate and rhythm.

[0710] Reported values and change from Baseline values of clinical laboratory data for safety (and the determinations relevant to the normal ranges and appropriate clinically significant or Common Terminology Criteria for Adverse Events (CTCAE) toxicity gradings) will be summarized by laboratory test for each assessment day, using descriptive statistics.

[0711] Vital signs (blood pressure, pulse rate, respiratory rate, and oral temperature) will be summarized by visit showing absolute values, change from Baseline values using descriptive statistics.

[0712] Physical and neurological examinations will be summarized by assessment day showing shift from Baseline.

[0713] The Columbia Suicide Severity Rating Scale (C-SSRS) assessment will be presented in a by-subject listing.

[0714] For continuous PK variables, descriptive summary statistics will, in addition, include geometric mean, geometric SD (GSD), arithmetic coefficients of variation (CV%), and geometric coefficients of variation (GCV%). Plasma TB006 concentrations over time will be presented, showing both individual and mean concentrations. Plasma PK parameters will also be calculated and presented descriptively. Plasma PK parameters of interest will include maximum concentration (Cₘₐₓ), minimum concentration (C_{trough}) time at which maximum plasma concentration occurs (Tₘₐₓ), area under the concentration-time profile over the dosing interval (tau) at steady state (AUC₀₋ₜₐᵤ), time required to reduce by half the plasma concentration of the drug (t½), clearance at steady state (CLₛₛ), and volume in steady state (Vₛₛ), as data permit. More details will be outlined in the statistical analysis plan (SAP).

[0715] The subject disposition showing numbers randomized, treated, completed, and discontinued from the example study will be summarized. For those subjects who discontinued the example study prematurely, the reason for discontinuation will be summarized.

[0716] All subject data will be reviewed for the occurrence of protocol deviations. Summaries will be presented showing the numbers of subjects with each class and type of deviation.

[0717] Demographic variables to be summarized will include age, gender, race, ethnicity, height, weight, and BMI.

[0718] Baseline characteristics to be summarized will include medical history.

[0719] Prior and concomitant medications will be summarized showing the number and percentage of subjects taking each medication. Medications will be coded using the World Health Organization Drug Dictionary (WHO DD) preferred name.

[0720] Determination of Sample Size: The sample size estimation is based on the change in neurological function from Baseline through Day 104 in the active treatment group compared with placebo group on the NIHSS total score. A 2.0 point absolute difference between placebo and the active treatment group in the change from Baseline is assumed.

[0721] The example is powered to assure 90% likelihood of identifying an absolute difference of 2.0 points between the active and placebo groups in the change from Baseline in the NIHSS total score. Sample size estimation is based on a repeated measures when the SD is 4.2 and a within correlation between visits is 0.5 for comparing the 2 means at Day 104. The maximum sample size required for randomization is 112 patients (56 per treatment group).

[0722] Benefit Assessment: TB006 is a humanized IgG4 (S228P) type monoclonal antibody that is highly specific and has high affinity to human Gal3. It has demonstrated efficacy in preclinical models of neurodegenerative disorders including stroke, AD, and TBI, and results are consistent with or superior to other compounds that have advanced into late-stage clinical studies. Preclinical data in the acute neurodegenerative models of stroke and TBI indicate a wide treatment window. Thus, there is potential for TB006 to be effective in these disorders. The preclinical safety profile of TB006 supports the further investigation of TB006 in clinical studies.

[0723] Patients will undergo clinical evaluations/assessments associated with example procedures (e.g., safety laboratory tests, vital signs, and ECG measurements, and physical and neurological examinations), which would be a potential benefit for their own health awareness.

[0724] The preclinical data on TB006 to date suggests a wide margin of safety and minimal risk of adverse effects. The risks associated with example procedures such as ECGs and blood draws are also very low. Any potential adverse effects associated with the example study drug and procedures are further minimized by intense safety monitoring and medical oversight by the investigator and staff. Therefore, the potential risks identified in association with TB006 are justified by the anticipated benefits that may be afforded to patients with AIS if TB006 is successfully developed.

[0725] Justification for Dose: A SAD study established the safety, tolerability, and PK of TB006 doses ranging from 70 to 5,000 mg in healthy volunteers. Exposures (Cₘₐₓ and AUC) at the highest dose afforded adequate safety margins from the exposures observed in the definitive GLP 1-month toxicology study. In the ongoing Phase 2 study in patients with Alzheimer’s Disease (AD), the same dose level of 1,000 mg QW × 5 doses is being assessed. The exposures (both Cₘₐₓ and AUC) from this dosing regimen will be lower than a single 5,000 mg dose, given that the same total dose is administered in divided doses over a month. Therefore, the exposures in the present example confer no additional risk than in previous studies.

[0726] The preclinical efficacy program established the potential of TB006 in several models of acute and chronic neurodegenerative disorders. Although plasma therapeutic concentration ranges have not been established, the data indicate a positive dose-response relationship across these models. Therefore, the highest safe dose that in the range of doses that are being tested in the Phase 1 program will likely afford the greatest probability of success. For these reasons, a dose regimen of 1,000 mg QW, which again is similar to the dose regimen used in the ongoing AD study, is selected as the dose level for this example.

### Example Study Intervention Administered

[0727] The example study intervention administered is depicted in Table 2. AxMP = alternative medicinal product; Gal3 = galectin-3; IB = Investigator’s Brochure; IMP = investigational medical product; NA = not applicable; NIMP = non investigational medicinal product; IV = intravenous(ly); QW = once per week.

TABLE 2

Example study intervention administered

| | | |
|---|---|---|
| Intervention label | TB006 | Placebo |
| Intervention Name | Anti-Gal3 antibody (TB006) | Placebo |
| Intervention description | IV administration of 1,000 mg, QW | IV administration of placebo, QW |
| Type | Drug | NA |
| Dose Formulation | Sterile, white, off-white, or light-yellow solution for injection | Placebo will be normal saline, 250 mL |
| Unit Dose Strength(s) | 20 mg/mL in 8 mL vials (160 mg total) | NA |
| Dosage Level(s) | Prior to administration, the drug product, at a dose of 1,000 mg, is | NA |
| | diluted in 250 mL of sterile normal saline | |
| Route of Administration | IV infusion over 1 hour | IV infusion over 1 hour |
| IMP and NIMP/AxMP | IMP | NIMP |
| Sourcing | Provided centrally by the sponsor | Provided centrally by the sponsor |
| Packaging and Labeling | TB006 will be provided as single-use injectable glass vials sealed with rubber stopper and aluminum plain flip top for sterile vial. Each vial will be labeled as required per country requirement. TB006 can be stored at \2-8° C. (36-46° F.) | An unblinded pharmacist will prepare the example drug. The placebo is plain saline bag, 250 mL, and will be identical in appearance to the active drug. |

[0728] TB006 sterilized drug product is supplied in 8 mL glass vials, sealed with a rubber stopper and an aluminum flip top, with strength of 160 mg (20 mg/mL, 8 mL) TB006 drug product per vial. TB006 drug product can be stored at 2-8° C. (36-46° F.).

[0729] TB006 drug product should be administered via IV infusion over 60 minutes, after dilution in 0.9% Sodium Chloride Injection, USP (normal saline) to a final volume of 250 mL. The dose formulation should be a sterile, white, off-white, or light-yellow solution.

[0730] For control, a placebo of 250 mL of normal saline will be administered IV QW over 1 hour. An unblinded pharmacist will prepare the example drug. The placebo is a plain saline bag of 250 mL and will be identical in appearance to the active drug.

[0731] An exemplary dose administration and follow up schema for the present example is provided in FIG. 36.

[0732] Example Study Intervention Compliance: Patients may be initially dosed as inpatients or at the investigator’s clinic. In either case, following discharge, patients will return to the clinic for dose administration (if any remain).

[0733] When participants are dosed, they will receive example study intervention directly from the investigator or designee, under medical supervision. TB006 infusions are administered IV over 1 hour. The date and time of each dose administered will be recorded in the source documents. The dose of example study intervention and participant identification will be confirmed at the time of dosing by a member of the site staff other than the person administering the example study intervention.

[0734] A record of the quantity of TB006 dispensed to and administered by each participant must be maintained and reconciled with study intervention and compliance records. Intervention start and stop dates, including dates for intervention delays and/or dose reductions will also be recorded.

### Efficacy Assessments

[0735] The primary efficacy assessment scale(s) selected for this example are the list of scale for the primary efficacy endpoints. Efficacy assessments will be performed at planned timepoints. Every effort should be made to ensure that the protocol required tests and procedures are completed as described. The primary efficacy assessment scales can include the National Institutes of Health Stroke Scale, Modified Rankin Scale, Fugl-Meyer Assessment, and/or the Montreal Cognitive Assessment, as described herein as well as generally known in the art. Other approaches of assessing qualities of stroke patients, including locomotor activity, and behavioral and cognitive ability, may also be employed.

### Safety Assessments

[0736] Physical examinations: A complete physical examination will include, at a minimum, assessments of the cardiovascular, respiratory, gastrointestinal, and neurological systems. Height (at screening only) and weight will also be measured and recorded. Investigators should pay special attention to clinical signs related to previous serious illnesses.

[0737] Vital signs: Oral temperature, pulse rate, respiratory rate, and blood pressure will be assessed. Blood pressure and pulse measurements will be assessed with a completely automated device. Manual techniques will be used only if an automated device is not available. Blood pressure and pulse measurements should be preceded by at least 5 minutes of rest for the participant in a quiet setting without distractions (e.g., television, cell phones). Vital signs will be taken before blood collection for laboratory tests, if that is scheduled for the same time point.

[0738] Electrocardiograms: 12-lead ECG(s) will be obtained using an ECG machine that automatically calculates the heart rate and measures PR, RR, QRS, QT, and QTc intervals. On non-dosing days, effort should be made to perform 12-lead ECGs time-matched with the pre-dose time point on dosing days. The investigator will review and assess all ECGs as Normal, Abnormal, or Not Evaluable.

[0739] The following clinical safety laboratory samples will be evaluated during the example:

[0740] Hematology: Hemoglobin, hematocrit, RBC count, WBC, platelet count, WBC count with differential (neutrophils, eosinophils, basophils, lymphocytes, and monocytes), % reticulocytes, MCV, MCH, and MCHC.

[0741] Clinical chemistry: albumin, total protein, blood glucose, sodium, potassium, creatinine, AST, ALT, ALP, GGT, total bilirubin, triglyceride, total cholesterol, CPK, LDH, calcium, uric acid, SGOT, total and direct bilirubin, BUN, SGPT, TSH, HbA1c, PT/INR.

[0742] Urinalysis: urine specific gravity, pH, protein, glucose, ketones, urobilinogen, bilirubin, leukocyte esterase, nitrite by dipstick and blood. Microscopic examination (if blood or protein is abnormal).

### Urine Alcohol and Drug Screen

[0743] Pharmacokinetics: Whole blood samples of approximately 5 mL will be collected for measurement of plasma concentrations of TB006. The timing of sampling may be altered during the course of the example based on newly available data (e.g., to obtain data closer to the time of peak plasma concentrations) to ensure appropriate monitoring. Samples will be used to evaluate the PK of TB006. Each plasma will be divided into 2 aliquots (1 each for PK and a backup). Samples collected for analyses of TB006 (plasma) concentration may also be used to evaluate safety or efficacy aspects related to concerns arising during or after the example study.

[0744] Immunogenicity Assessments: Antibodies to TB006 will be evaluated in plasma samples collected from all participants. Additionally, plasma samples should also be collected at the final visit from participants who discontinued example study intervention or were withdrawn from the example study. Plasma samples will be screened for antibodies binding to TB006 and the titer of confirmed positive samples will be reported. Other analyses may be performed to verify the stability of antibodies to TB006 and/or further characterize the immunogenicity of TB006.

[0745] The detection and characterization of antibodies to TB006 will be performed using a validated assay method by or under the supervision of the sponsor. ADA assessment is performed on blood sample collected for PK assessments; Day 1 assessment is performed on the pre dose sample. All samples collected for detection of antibodies to example study intervention will also be evaluated for TB006 plasma concentration to enable interpretation of the antibody data. Antibodies may be further characterized and/or evaluated for their ability to neutralize the activity of the example study intervention(s). Samples may be stored for a maximum of 15 years (or according to local regulations) following the last participant’s last visit for the example study at a facility selected by the sponsor to enable further analysis of immune responses to TB006.

### Statistical Analyses

[0746] General considerations: Summary statistics will be reported by treatment group for efficacy endpoints (NIHSS total score, mRS, FMA, MoCA total score) and change from Baseline in each of these efficacy endpoints at each applicable visit. Unadjusted and adjusted mean treatment differences, along with the 95% CI of the change from Baseline in each efficacy endpoint at each applicable visit will also be reported. Adjusted mean treatment difference will be derived by using a MMRM that includes the fixed-effects of treatment, visit (categorical covariate), treatment-by-visit interaction, and Baseline score. An unstructured variance covariance matrix might be used, where appropriate. Appropriate linear contrast will be used to compare the 2 treatment groups.

[0747] Baseline values will be taken as the most recent assessment prior to dosing, reported during screening and up to and including Day 1.

[0748] Primary Endpoint(s): The primary efficacy measure is the change in neurological function from Baseline in the NIHSS total score through Day 104. The primary analysis will determine whether there is a difference between the active treatment group and the placebo treatment group in mean change from Baseline at Day 104 in the NIHSS total score, according to the methods noted above. Effect size will also be determined.

[0749] For testing as the change from Baseline on the NIHSS, the adjusted mean treatment differences will be derived by using a MMRM that includes the fixed effects of treatment, visit (categorical covariate), treatment-by-visit interaction, and Baseline score. An unstructured variance-covariance matrix might be used, where appropriate. Appropriate linear contrast will be used to compare the 2 treatment groups.

[0750] Secondary Endpoint(s): For testing the proportion of patients with clinically significant improvement on the mRS (defined as a 1-point decrease) and NIHSS (defined as a 4-point decrease) on Day 36 (and sustained through Day 104) will be compared using a Mantel-Haenszel test.

[0751] For testing the change from Baseline on the FMA total score and the MoCA total score, the adjusted mean treatment differences will be derived by using a MMRM that includes the fixed-effects of treatment, visit (categorical covariate), treatment-by-visit interaction, and Baseline score. An unstructured variance-covariance matrix might be used, where appropriate. Appropriate linear contrast will be used to compare the 2 treatment groups. For the immunogenicity assessment, ADA results will be descriptively summarized.

### Example 13: Treatment of Acute Ischemic Stroke With an Anti-Gal3 Antibody

[0752] A patient presents with acute ischemic stroke (AIS). An anti-Gal3 antibody or binding fragment thereof as described herein, such as TB006, is administered to the patient, ideally within 7 days of the incidence of the stroke event. The patient is administered with 5 unit doses of 1000 mg or about 1000 mg of the anti-Gal3 antibody or binding fragment thereof per each unit dose. The unit doses are administered to the patient every 7 days or about 7 days (i.e. administering the full course of 5 unit doses will take approximately 30 days from the time of first dose). The unit doses are each prepared as 250 mL solutions of saline containing the 1000 mg or about 1000 mg of antibody or binding fragment thereof, and are administered over the course of 1 hour or about 1 hour.

[0753] Following the full course of administration, the patient is monitored for improvements related to the stroke or symptoms thereof, such as locomotor activity, and behavioral and cognitive ability. The patient can be assessed starting 7 days following the last dose administration, and can also be assessed subsequently approximately every month if needed (e.g. after 7, 35, and 75 days after the last dose administration). The patient is assessed by standardized approaches used for diagnosing stroke, such as the NIHSS, mRS, FMA, or MoCA, or any combination thereof. If the NIHSS is used, the patient is considered to have an amelioration of the stroke if the patient exhibits at least a 4 point decrease on the NIHSS. If the mRS is used, the patient is considered to have an amelioration of the stroke if the patient exhibits at least a 1 point decrease on the mRS. If the FMA is used, the patient is considered to have an amelioration of the stroke if the patient exhibits at least a 1 point increase on the FMA. If the MoCA is used, the patient is considered to have an amelioration of the stroke if the patient exhibits at least a 1 point increase on the MoCA. Additional and/or alternative approaches may also be used, such as neuroimaging, CT, MRI, and/or detecting stroke biomarkers such as S100B, GFAP, NSE, and/or MMP9.

[0754] In at least some of the previously described embodiments, one or more elements used in an embodiment can interchangeably be used in another embodiment unless such a replacement is not technically feasible. It will be appreciated by those skilled in the art that various other omissions, additions and modifications may be made to the methods and structures described above without departing from the scope of the claimed subject matter. All such modifications and changes are intended to fall within the scope of the subject matter, as defined by the appended claims.

[0755] With respect to the use of substantially any plural and/or singular terms herein, those having skill in the art can translate from the plural to the singular and/or from the singular to the plural as is appropriate to the context and/or application. The various singular/plural permutations may be expressly set forth herein for sake of clarity.

[0756] It will be understood by those within the art that, in general, terms used herein, and especially in the appended claims (e.g., bodies of the appended claims) are generally intended as “open” terms (e.g., the term “including” should be interpreted as “including but not limited to,” the term “having” should be interpreted as “having at least,” the term “includes” should be interpreted as “includes but is not limited to,” etc.). It will be further understood by those within the art that if a specific number of an introduced claim recitation is intended, such an intent will be explicitly recited in the claim, and in the absence of such recitation no such intent is present. For example, as an aid to understanding, the following appended claims may contain usage of the introductory phrases “at least one” and “one or more” to introduce claim recitations. However, the use of such phrases should not be construed to imply that the introduction of a claim recitation by the indefinite articles “a” or “an” limits any particular claim containing such introduced claim recitation to embodiments containing only one such recitation, even when the same claim includes the introductory phrases “one or more” or “at least one” and indefinite articles such as “a” or “an” (e.g., “a” and/or “an” should be interpreted to mean “at least one” or “one or more”); the same holds true for the use of definite articles used to introduce claim recitations. In addition, even if a specific number of an introduced claim recitation is explicitly recited, those skilled in the art will recognize that such recitation should be interpreted to mean at least the recited number (e.g., the bare recitation of “two recitations,” without other modifiers, means at least two recitations, or two or more recitations). Furthermore, in those instances where a convention analogous to “at least one of A, B, and C, etc.” is used, in general such a construction is intended in the sense one having skill in the art would understand the convention (e.g., “a system having at least one of A, B, and C” would include but not be limited to systems that have A alone, B alone, C alone, A and B together, A and C together, B and C together, and/or A, B, and C together, etc.). In those instances where a convention analogous to “at least one of A, B, or C, etc.” is used, in general such a construction is intended in the sense one having skill in the art would understand the convention (e.g., “a system having at least one of A, B, or C” would include but not be limited to systems that have A alone, B alone, C alone, A and B together, A and C together, B and C together, and/or A, B, and C together, etc.). It will be further understood by those within the art that virtually any disjunctive word and/or phrase presenting two or more alternative terms, whether in the description, claims, or drawings, should be understood to contemplate the possibilities of including one of the terms, either of the terms, or both terms. For example, the phrase “A or B” will be understood to include the possibilities of “A” or “B” or “A and B.”

[0757] In addition, where features or aspects of the disclosure are described in terms of Markush groups, those skilled in the art will recognize that the disclosure is also thereby described in terms of any individual member or subgroup of members of the Markush group.

[0758] As will be understood by one skilled in the art, for any and all purposes, such as in terms of providing a written description, all ranges disclosed herein also encompass any and all possible sub-ranges and combinations of sub-ranges thereof. Any listed range can be easily recognized as sufficiently describing and enabling the same range being broken down into at least equal halves, thirds, quarters, fifths, tenths, etc. As a non-limiting example, each range discussed herein can be readily broken down into a lower third, middle third and upper third, etc. As will also be understood by one skilled in the art all language such as “up to,” “at least,” “greater than,” “less than,” and the like include the number recited and refer to ranges which can be subsequently broken down into sub-ranges as discussed above. Finally, as will be understood by one skilled in the art, a range includes each individual member. Thus, for example, a group having 1-3 articles refers to groups having 1, 2, or 3 articles. Similarly, a group having 1-5 articles refers to groups having 1, 2, 3, 4, or 5 articles, and so forth.

[0759] While various aspects and embodiments have been disclosed herein, other aspects and embodiments will be apparent to those skilled in the art. The various aspects and embodiments disclosed herein are for purposes of illustration and are not intended to be limiting, with the true scope and spirit being indicated by the following claims.

[0760] A Sequence Listing in electronic format is submitted herewith. Some of the sequences provided in the Sequence Listing may be designated as Artificial Sequences by virtue of being non-naturally occurring fragments or portions of other sequences, including naturally occurring sequences. Some of the sequences provided in the Sequence Listing may be designated as Artificial Sequences by virtue of being combinations of sequences from different origins, such as humanized antibody sequences.

[0761] All references cited herein, including but not limited to published and unpublished applications, patents, and literature references, are incorporated herein by reference in their entirety and are hereby made a part of this specification. To the extent publications and patents or patent applications incorporated by reference contradict the disclosure contained in the specification, the specification is intended to supersede and/or take precedence over any such contradictory material.

### REFERENCES

[0762] Ajjan R, Grant PJ (2006) Coagulation and atherothrombotic disease. Atherosclerosis 186: 240-59.

[0763] Andrade RJ, Robles M, Lucena MI. Rechallenge in drug-induced liver injury: the attractive hazard. Expert Opin Drug Saf. 2009;8:709-714.

[0764] Ashraf GM et. al. “Investigation of Gal-3 Expression Pattern in Serum and Cerebrospinal Fluid of Patients Suffering From Neurodegenerative Disorders.” Front. Neurosci. 2018, 12:430. PMCID: PMC6033997

[0765] Banks JL, Marotta CA. Outcomes Validity and Reliability of the Modified Rankin Scale: Implications for Stroke Clinical Trials. Stroke 2007;38(3):1091-1096.

[0766] Barua RS, Sy F, Srikanth S, Huang G, Javed U, et al. (2010) Effects of cigarette smoke exposure on clot dynamics and fibrin structure: an ex vivo investigation. Arterioscler Thromb Vasc Biol 30: 75-9.

[0767] Benjamin EJ, Blaha MJ, Chiuve SE, et al. (2017). Heart disease and stroke statistics-2017 update: a report from the American Heart Association. Circulation, 135, e146-e603.

[0768] Boza-Serrano A, et. al. “Galectin-3, a novel endogenous TREM2 ligand, detrimentally regulates inflammatory response in Alzheimer’s disease.” Acta Neuropathol. 2019, 138(2):251-273. PMCID: PMC6660511

[0769] Brott T, Adams HP, Olinger CP, et al. Measurements of acute cerebral infarction-a clinical examination scale. Stroke 1989;20 (7):864-70.

[0770] Burguillos MA, et. al. “Microglia-Secreted Galectin-3 Acts as a Toll-like Receptor 4 Ligand and Contributes to Microglial Activation.” Cell Rep. 2015, 10:1626-1638.

[0771] Carter AM, Cymbalista CM, Spector TD, Grant PJ (2007) Heritability of clot formation, morphology, and lysis: the EuroCLOT study. Arterioscler Thromb Vasc Biol 27: 2783-9.

[0772] Centers for Disease Control and Prevention. (2015). Report to Congress on Traumatic Brain Injury in the United States: Epidemiology and Rehabilitation. National Center for Injury Prevention and Control; Division of Unintentional Injury Prevention. Atlanta, GA.

[0773] Chistiakov DA et al. The role of monocytosis and neutrophilia in atherosclerosis. J. Cell Mol. Med. (2018) 22(3):1366-1382.

[0774] Collet JP, Allali Y, Lesty C, Tanguy ML, Silvain J, et al. (2006) Altered fibrin architecture is associated with hypofibrinolysis and premature coronary atherothrombosis. Arterioscler Thromb Vasc Biol 26: 2567-73

[0775] Corrado E, Rizzo M, Coppola G, Fattouch K, Novo G, et al. (2010) An update on the role of markers of inflammation in atherosclerosis. J Atheroscler Thromb 17: 1-11.

[0776] Dunn EJ, Ariens RA, Grant PJ (2005) The influence of type 2 diabetes on fibrin structure and function. Diabetologia 48: 1198-206.

[0777] Dunn EJ, Philippou H, Ariens RA, Grant PJ (2006) Molecular mechanisms involved in the resistance of fibrin to clot lysis by plasmin in subjects with type 2 diabetes mellitus. Diabetologia 49: 1071-80.

[0778] Eric S Donkor Stroke in the 21st Century: A Snapshot of the Burden, Epidemiology, and Quality of Life Stroke Res Treat. 2018; 2018: 3238165.

[0779] Fang MC, Cutler DM, Rosen AB. (2010). Trends in Thrombolytic Use for Ischemic Stroke in the United States. J Hosp Med, 5(7), 406-409.

[0780] Fatkhullina AR et al. The Role of Cytokines in the Development of Atherosclerosis. Biochemistry (Mosc) (2016) 81(11):1358-1370.

[0781] Fugl-Meyer, AR et al. The post-stroke hemiplegic patient. I. a method for evaluation of physical performance”. Scandinavian Journal of Rehabilitation Medicine 1975;7(1):13-31.

[0782] Freynhofer MK, Bruno V, Wojta J, Huber K (2012) The role of platelets in athero-thrombotic events. Curr Pharm Des 18: 5197-214.

[0783] Go AS, Mozaffarian D, Roger VL, et al. (2014). Executive summary: heart disease and stroke statistics—2014 update: a report from the American Heart Association. Circulation, 129, 399-410.

[0784] Goldstein LB, Bartels C, Davis JN. Interrater reliability of the NIH Stroke Scale. Arch Neurology 1989;46 (6):660-662.

[0785] Green AR, Ashwood T. (2005). Free radical trapping as a therapeutic approach to neuroprotection in stroke: experimental and clinical studies with NXY-059 and free radical scavengers. Curr Drug Targets-CNS & Neurol Dis, 4, 109-118.

[0786] Hachinski V, Iadecola C, Petersen RC, et al. National Institute of Neurological Disorders and Stroke-Canadian Stroke Network vascular cognitive impairment harmonization standards. Stroke 2006;37:2220-2241.

[0787] Hunt, CM. Mitochondrial and immunoallergic injury increase risk of positive drug rechallenge after drug-induced liver injury: A systematic review. Hepatol. 2010;52:2216-2222.

[0788] Inoue Y et al. Current Management and Therapeutic Strategies for Cerebral Amyloid Angiopathy. Int. J. Mol. Sci. (2021) 22, 3869 p. 1-15.

[0789] Leander K, Blomback M, Wallen H, He S (2012) Impaired fibrinolytic capacity and increased fibrin formation associate with myocardial infarction. Thromb Haemost 07: 1092-9.

[0790] Lee Y-J et al. Spatial and temporal expression, and statin responsiveness of galectin-1 and galectin-3 in murine atherosclerosis. Korean Circ. J. (2013) 43(4):223-30.

[0791] Liu Y et al. Association of the Total White Blood Cell, Neutrophils, and Monocytes Count with the Presence, Severity, and Types of Carotid Atherosclerotic Plaque. Front. Med. (2020) 7:313.

[0792] Lu Y et al. Modified citrus pectin inhibits galectin-3 function to reduce atherosclerotic lesions in apoE-deficient mice. Mol. Med. Rep. (2017) 16(1):647-653.

[0793] Madrigal-Matute J, Lindholt JS, Fernandez-Garcia CE, et al. (2014). Galectin-3, a biomarker linking oxidative stress and inflammation with the clinical outcomes of patients with atherothrombosis. J Am Heart Assoc, 3(4), pii:e00078.

[0794] McKee AC, Robinson ME. “Military-related traumatic brain injury and neurodegeneration.” Alzheimers Dement. 2014, 10(30): S242-S253.

[0795] Mehndiratta P. et al. “Cerebral amyloid angiopathy-associated intracerebral hemorrhage: pathology and management” Neurosurg Focus 2012 Apr;32(4).

[0796] Mills JD, Ariens RA, Mansfield MW, Grant PJ (2002) Altered fibrin clot structure in the healthy relatives of patients with premature coronary artery disease. Circulation 106: 1938-42.

[0797] Murphy TH, Corbett D. (2009). Plasticity during stroke recovery: from synapse to behaviour. Nat Rev Neurosci, 10, 861-872.

[0798] Nachtigal M et al. Galectin-3 expression in human atherosclerotic lesions. Am. J. Pathol. (1998) 152(5):1199-1208.

[0799] Nasreddine ZS, Phillips NA, Bédirian V, et al. The Montreal Cognitive Assessment, MoCA: a brief screening tool for mild cognitive impairment. J Am Geriatr Soc.2005;53:695-699.

[0800] Nishikawa H, Suzuki H. “Possible Role of Inflammation and Galectin-3 in Brain Injury after Subarachnoid Hemorrhage.” Brain Sci 2018, 8(2):30.

[0801] O’Collins VE, Macleod MR, Donnan GA, et al. (2006). 1,026 experimental treatments in acute stroke. Ann Neurol, 59, 467-477.

[0802] Osmancik P, Paulu P, Tousek P, Kocka V, Widimsky P (2012) High leukocyte count and interleukin-10 predict high on-treatment-platelet-reactivity in patients treated with clopidogrel. J Thromb Thrombolysis 33: 349-54.

[0803] Page S, Fulk G, Boyne P. Clinically Important Differences for the Upper-Extremity Fugl-Meyer Scale in People With Minimal to Moderate Impairment Due to Chronic Stroke. Journal of the American Physical Therapy Association 2012;92 (6):791-798.

[0804] Papaspyridonos M et al. Galectin-3 Is an Amplifier of Inflammation in Atherosclerotic Plaque Progression Through Macrophage Activation and Monocyte Chemoattraction. Arteriosclerosis, Thrombosis, and Vascular Biology. (2008);28:433-440.

[0805] Papay JI, Clines D, Rafi R, Yuen N, Britt SD, Walsh JS, Hunt CM. Drug-induced liver injury following positive drug rechallenge. Regul Tox Pharm. 2009;54:84-90.

[0806] Paul J. et al. Fibrin deposition accelerates neurovascular damage and neuroinflammation in mouse models of Alzheimer’s disease. J Exp Med. 2007 Aug 6;204(8):1999-2008.

[0807] Powers WJ, Rabinstein AA, Ackerson T, et al. (2018). 2018 guidelines for the early management of patients with acute ischemic stroke: a guideline for healthcare professionals from the American Heart Association/American Stroke Association. Stroke, 49, e46-e110.

[0808] Puigdellivol M. et al. “Sialylation and Galectin-3 in Microglia-Mediated Neuroinflammation and Neurodegeneration.” Front. Cell. Neurosci. 2020, 14:162. PMCID: PMC7296093

[0809] Reijmer YD. et al. “Ischemic brain injury in cerebral amyloid angiopathy” J Cereb Blood Flow Metab. 2016 Jan; 36(1): 40-54.

[0810] Rodrigues MA et al. The Edinburgh CT and genetic diagnostic criteria for lobal intracerebral haemorrhage associated with cerebral amyloid angiopathy: model development and diagnostic test accuracy study. Lancet Neurol. (2018) 17(3):232-240.

[0811] Romain Goulay et al. “From Stroke to Dementia: a Comprehensive Review Exposing Tight Interactions Between Stroke and Amyloid-β Formation” Transl Stroke Res. 2020; 11(4): 601-614.

[0812] Sanford J, Moreland J. Reliability of the Fugl-Meyer Assessment for Testing Motor Performance in Patients Following Stroke. Rehabilitation Measures Database1993;73 (7):447-54.

[0813] Satoh K, Niwa M, Goda W, et al. (2011). Galectin-3 expression in delayed neuronal death of hippocampal CA1 following transient forebrain ischemia, and its inhibition by hypothermia. Brain Res, 1382, 266-274.

[0814] Scott EM, Ariens RA, Grant PJ (2004) Genetic and environmental determinants of fibrin structure and function: relevance to clinical disease. Arterioscler Thromb Vasc Biol 24: 1558-66.

[0815] Shan R et. al. “A New Panel of Blood Biomarkers for the Diagnosis of Mild Traumatic Brain Injury/Concussion in Adults.” J Neurotrauma 2016, 33(1):49-57.

[0816] Shen, YF et. al. “The change of plasma galectin-3 concentrations after traumatic brain injury.” Clin. Chim. Acta 2016, 456:75-80.

[0817] Toglia J, Fitzgerald KA, O’Dell MW, Mastrogiovanni AR, Lin CD. The Mini-Mental State Examination and Montreal Cognitive Assessment in persons with mild subacute stroke: relationship to functional outcome. Arch Phys Med Rehabil. 2011;92:792-798.

[0818] Undas A, Kolarz M, Kopec G, Tracz W (2008) Altered fibrin clot properties in patients on long-term haemodialysis: relation to cardiovascular mortality. Nephrol Dial Transplant 23: 2010-5.

[0819] Undas A, Plicner D, Stepien E, Drwila R, Sadowski J (2007) Altered fibrin clot structure in patients with advanced coronary artery disease: a role of C-reactive protein, lipoprotein(a) and homocysteine. J Thromb Haemost 5: 1988-90.

[0820] Undas A, Szuldrzynski K, Stepien E, Zalewski J, Godlewski J, et al. (2008) Reduced clot permeability and susceptibility to lysis in patients with acute coronary syndrome: effects of inflammation and oxidative stress. Atherosclerosis 196: 551-7.

[0821] van Swieten JC, Koudstaal PJ, Visser MC, Schouten HJ, van GJ. Interobserver agreement for the assessment of handicap in stroke patients. Stroke 1988;19:604-607.

[0822] Veerbeek JM, van Wegen E, van Peppen R, et al. (2014). What is the evidence for physical therapy poststroke? A systematic review and meta-analysis. PLoS One, 9,e87987.

[0823] Virani SS, Alonso A, Benjamin EJ, et al. (2020). Heart disease and stroke statistics-2020 update: a report from the American Heart Association. Circulation, 141(9), e139-e596.

[0824] Viswanathan A & Greenberg SM. Cerebral amyloid angiopathy in the elderly. Ann. Neurol. (2011) 70(6):871-80.

[0825] Wang X. et. al “Elevated Galectin-3 Levels in the Serum of Patients With Alzheimer’s Disease.” Am J Alzheimers Dis Other Demen 2015, 30(8):729-32. PMID: 23823143.

[0826] Wang Y, Hel S, Liu X, et al. (2021). Galectin-3 Mediated Inflammatory Response Contributes to Neurological Recovery by QiShenYiQi in Subacute Stroke Model. Front.Pharmacol, https://doi.org/10.3389/fphar.2021.588587.

[0827] Weisel JW & Litvinov RI. Mechanisms of fibrin polymerization and clinical implications. Blood (2013) 121(10):1712-1719.

[0828] Yan YP, Lang BT, Vemuganti R, Dempsey RJ. (2009). Galectin-3 mediates post-ischemic tissue remodeling. Brain Res, 1288, 116-124.

[0829] Yip PK, et. al. “Galectin-3 released in response to traumatic brain injury acts as an alarmin orchestrating brain immune response and promoting neurodegeneration.” Sci. Rep. 2017, 7:41689.

[0830] Yoo SH, Kim JS, Kwon SU, Yun SC, Koh JY, Kang DW. Undernutrition as a predictor of poor clinical outcomes in acute ischemic stroke patients. Archives of neurology. 2008Jan 1;65(1):39-43.

What is claimed is:

1. A method for inhibiting, reducing, preventing, and/or treating stroke in a subject in need thereof, comprising administering an anti-Gal3 antibody or binding fragment thereof to the subject, thereby inhibiting, reducing, preventing, and/or treating the stroke.

2. The method of claim 1, further comprising selecting the subject as having the stroke or at risk of contracting the stroke prior to the administering step, wherein selecting the subject as having the stroke or at risk of contracting the stroke comprises assessing the subject according to the National Institutes of Health Stroke Scale (NIHSS), modified Rankin Scale (mRS), Fugl-Meyer Assessment (FMA), Montreal Cognitive Assessment (MoCA), neuroimaging, optionally CT or MRI, and/or detecting stroke biomarkers, optionally S100 calcium binding protein B (S100B), glial fibrillary acidic protein (GFAP), neuron-specific enolase (NSE), and/or matrix metalloproteinase-9 (MMP9).

3-4. (canceled)

5. The method of claim 14, further comprising detecting an improvement by the subject according to the NIHSS, mRS, FMA, or MoCA, wherein:
a) the improvement by the subject according to the NIHSS comprises at least a 4 point decrease on the NIHSS;
b) the improvement by the subject according to the mRS comprises at least a 1 point decrease on the mRS;
c) the improvement by the subject according to the FMA comprises at least a 1 point increase on the FMA; and/or
d) the improvement by the subject according to the MoCA comprises at least a 1 point increase on the MoCA;
after the administering step, optionally as assessed 7, 35, and/or 75 days after the administering step.

6. The method of claim 5, wherein:
a) the improvement by the subject according to the NIHSS comprises at least a 4 point decrease on the NIHSS;
b) the improvement by the subject according to the mRS comprises at least a 1 point decrease on the mRS;
c) the improvement by the subject according to the FMA comprises at least a 1 point increase on the FMA; and/or
d) the improvement by the subject according to the MoCA comprises at least a 1 point increase on the MoCA;
after the administering step, optionally as assessed 7, 35, and/or 75 days after the administering step.

7. The method of claim 1, wherein the stroke is an ischemic stroke, thrombotic stroke, embolic stroke, transient ischemic attack, hemorrhagic stroke, intracerebral hemorrhage, or subarachnoid hemorrhage.

8-9. (canceled)

10. The method of claim 1, wherein administration of the anti-Gal3 antibody or binding fragment thereof prevents or reduces loss of locomotor dysfunction, prevents incidence of microhemorrhage, prevents elevation of levels of activated microglia, prevents elevation of levels of activated astrocytes, prevents elevation of circulating proinflammatory immune cells, prevents elevation of circulating proinflammatory cytokines, or any combination thereof, in the subject.

11-12. (canceled)

13. The method of claim 10, wherein the reduction in locomotor dysfunction, reduction in microhemorrhage, reduction in levels of activated microglia, reduction in levels of activated astrocytes, reduction in levels of circulating proinflammatory cytokines, or any combination thereof, in the subject, is by at least 5%, 10%, 20%, 30%, 40%, 50%, 60%, 70%, 80%, 90%, or 95%, or any percentage within a range defined by any two of the aforementioned reductions.

14-18. (canceled)

19. The method of claim 10, wherein the reduction in levels of activated microglia is assessed by detection of microglia activation markers, optionally ionized calcium-binding adaptor molecule 1 (Iba1), monocyte chemoattractant protein-1 (MCP-1), chitinase-3-like protein 1 (YKL-40), and/or soluble CD14 (sCD14), optionally from the cerebrospinal fluid of the subject.

20. (canceled)

21. The method of claim 10, wherein the reduction in levels of activated astrocytes is assessed by detection of astrocyte activation markers, optionally GFAP and/or S100B, optionally from the cerebrospinal fluid of the subject.

22. The method of claim 10, wherein the proinflammatory immune cells comprise NK cells, monocytes, and/or lymphocytes and/or the proinflammatory cytokines comprise IL-6, TNF-α, and/or IL1β.

23-28. (canceled)

29. The method of claim 1, wherein the anti-Gal3 antibody or binding fragment thereof comprises one or more of: TB001, TB006, 12G5.D7, 13A12.2E5, 14H10.2C9, 15F10.2D6, 19B5.2E6, 20D11.2C6, 20H5.A3, 23H9.2E4, 2D10.2B2, 3B11.2G2, 7D8.2D8, mIMT001, 4A11.2B5, 4A11.H1L1, 4A11.H4L2, 4G2.2G6, 6B3.2D3, 6H6.2D6, 9H2.2H10, 13G4.2F8, 13H12.2F8, 15G7.2A7, 19D9.2E5, 23B10.2B12, 24D12.2H9, F846C.1B2, F846C.1F5, F846C.1H12, F846C.1H5, F846C.2H3, F846TC.14A2, F846TC.14E4, F846TC.16B5, F846TC.7F10, F847C.10B9, F847C.11B1, F847C.12F12, F847C.26F5, F847C.4B10, F849C.8D10, F849C.8H3, 846.2B 11, 846.4D5, 846T.1H2, 847.14H4, 846.2D4, 846.2F11, 846T.10B1, 846T.2E3, 846T.4C9, 846T.4E11, 846T.4F5, 846T.8D1, 847.10C9, 847.11D6, 847.15D12, 847.15F9, 847.15H11, 847.20H7, 847.21B11, 847.27B9, 847.28D1, 847.2B8, 847.3B3, 849.1D2, 849.2D7, 849.2F12, 849.4B2, 849.4F12, 849.4F2, 849.5C2, 849.8D12, F847C.21H6, 849.5H1, 847.23F11, 847.16D10, 847.13E2-mH0mL1, 847.13E2-mH0mL2, 847.12C4, 847.4D3, 2D10-VH0-VL0, 2D10-hVH4-HVL1, 2D10-hVH4-HVL2, 2D10-hVH4-HVL3, 2D10-hVH4-HVL4, 2D10-hVH3-HVL1, 2D10-hVH3-HVL2, 2D10-hVH3-HVL3, 2D10-hVH3-HVL4, 20H5.A3-VH3VL1, 20H5.A3-VH3VL3, 20H5.A3-VH4VL1, 20H5.A3-VH5VL1, 20H5.A3-VH5VL3, 20H5.A3-VH6VL1, 20H5.A3-VH6VL3, or binding fragment thereof.

30-33. (canceled)

34. The method of claim 1, wherein the stroke is hemorrhagic stroke, intracerebral hemorrhage, or subarachnoid hemorrhage, and the one or more additional therapeutic compositions comprise antihypertensives, or nicardipine, or any combination thereof.

35. A method for inhibiting, reducing, preventing, and/or treating traumatic brain injury (TBI) in a subject in need thereof, comprising administering an anti-Gal3 antibody or binding fragment thereof to the subject, thereby inhibiting, reducing, preventing, and/or treating the TBI.

36. The method of claim 35, further comprising selecting the subject as having the TBI or at risk of contracting the TBI prior to the administering step, wherein selecting the subject as having the TBI comprises assessing the subject for level of consciousness, memory loss, and/or the Glasgow Coma Scale, neuroimaging, optionally CT or MRI and/or detecting TBI biomarkers, optionally GFAP and/or ubiquitin carboxy-terminal hydrolase L1 (UCH-L1).

37-38. (canceled)

39. The method of claim 35, wherein the TBI is associated with a concussion, edema, diffuse axonal injury, spinal cord injury, coma, neuroinflammation, microhemorrhage, astrocytosis, activated microglia, and/or hematoma.

40. The method of claim 35, wherein administration of the anti-Gal3 antibody or binding fragment thereof to the subject prevents or treats the TBI, concussion, edema, diffuse axonal injury, spinal cord injury, coma, neuroinflammation, microhemorrhage, astrocytosis, activated microglia, and/or hematoma.

41. The method of claim 35, wherein administration of the anti-Gal3 antibody or binding fragment thereof prevents or reduces elevation of levels of activated microglia, prevents elevation of levels of activated astrocytes, prevents elevation of levels of macrophages, prevents elevation of levels of hyperphosphorylated Tau, prevents incidence of microhemorrhage, prevents neuroinflammation, prevents elevation of levels of circulating proinflammatory cytokines, or any combination thereof, in the subject.

42. (canceled)

43. The method of claim 35, wherein administration of the anti-Gal3 antibody or binding fragment thereof improves the level of consciousness, memory loss, and/or the Glasgow Coma Scale of the patient; and/or reduces levels of activated microglia, reduces levels of activated astrocytes, reduces levels of macrophages, reduces levels of hyperphosphorylated Tau, reduces microhemorrhage, reduces neuroinflammation, reduces levels of circulating proinflammatory cytokines or any combination thereof, in the subject.

44. The method of claim 43, wherein the reduction in levels of activated microglia, reduction in levels of activated astrocytes, reduction in levels of macrophages, reduction in levels of hyperphosphorylated Tau, reduction in microhemorrhage, reduction in neuroinflammation, reduction in levels of circulating proinflammatory cytokines, or any combination thereof, in the subject, is by at least 5%, 10%, 20%, 30%, 40%, 50%, 60%, 70%, 80%, 90%, or 95%, or any percentage within a range defined by any two of the aforementioned reductions.

45-60. (canceled)

61. The method of claim 35, wherein the anti-Gal3 antibody or binding fragment thereof comprises one or more of: TB001, TB006, 12G5.D7, 13A12.2E5, 14H10.2C9, 15F10.2D6, 19B5.2E6, 20D11.2C6, 20H5.A3, 23H9.2E4, 2D10.2B2, 3B11.2G2, 7D8.2D8, mIMT001, 4A11.2B5, 4A11.H1L1, 4A11.H4L2, 4G2.2G6, 6B3.2D3, 6H6.2D6, 9H2.2H10, 13G4.2F8, 13H12.2F8, 15G7.2A7, 19D9.2E5, 23B10.2B12, 24D12.2H9, F846C.1B2, F846C.1F5, F846C.1H12, F846C.1H5, F846C.2H3, F846TC.14A2, F846TC.14E4, F846TC.16B5, F846TC.7F10, F847C.10B9, F847C.11B1, F847C.12F12, F847C.26F5, F847C.4B10, F849C.8D10, F849C.8H3, 846.2B 11, 846.4D5, 846T.1H2, 847.14H4, 846.2D4, 846.2F11, 846T.10B1, 846T.2E3, 846T.4C9, 846T.4E11, 846T.4F5, 846T.8D1, 847.10C9, 847.11D6, 847.15D12, 847.15F9, 847.15H11, 847.20H7, 847.21B11, 847.27B9, 847.28D1, 847.2B8, 847.3B3, 849.1D2, 849.2D7, 849.2F12, 849.4B2, 849.4F12, 849.4F2, 849.5C2, 849.8D12, F847C.21H6, 849.5H1, 847.23F11, 847.16D10, 847.13E2-mH0mL1, 847.13E2-mH0mL2, 847.12C4, 847.4D3, 2D10-VH0-VL0, 2D10-hVH4-HVL1, 2D10-hVH4-HVL2, 2D10-hVH4-HVL3, 2D10-hVH4-HVL4, 2D10-hVH3-HVL1, 2D10-hVH3-HVL2, 2D10-hVH3-HVL3, 2D10-hVH3-HVL4, 20H5.A3-VH3VL1, 20H5.A3-VH3VL3, 20H5.A3-VH4VL1, 20H5.A3-VH5VL1, 20H5.A3-VH5VL3, 20H5.A3-VH6VL1, 20H5.A3-VH6VL3, or binding fragment thereof.

62-65. (canceled)

66. A method for inhibiting, reducing, preventing, and/or treating a disorder associated with fibrin activity or dysfunction in a subject in need thereof, comprising administering an anti-Gal3 antibody or binding fragment thereof to the subject, thereby inhibiting, reducing, preventing, and/or treating the disorder associated with fibrin activity or dysfunction.

67. The method of claim 66, wherein the disorder associated with fibrin activity or dysfunction comprises atherosclerosis, thrombosis, thromboembolism, carotid artery disease, coronary artery disease, peripheral artery disease, myocardial infarction, heart failure, heart attack, hypertension, chronic kidney disease, coagulopathy, or thrombocytopathy.

68. The method of claim 67, further comprising selecting the subject as having the disorder associated with fibrin activity or dysfunction or at risk of contracting the disorder associated with fibrin activity or dysfunction prior to the administering step, wherein selecting the subject as having or being at risk of having the disorder associated with fibrin activity or dysfunction comprises detecting thrombotic biomarkers, optionally fibrinogen, C-reactive protein (CRP), and/or plasminogen activator inhibitor-1 (PAI-1).

69-71. (canceled)

72. The method of claim 66, wherein administration of the anti-Gal3 antibody or binding fragment thereof to the subject reduces neuroinflammation and/or fibrin oligomerization in the subject by at least 5%, 10%, 20%, 30%, 40%, 50%, 60%, 70%, 80%, 90%, or 95%, or any percentage within a range defined by any two of the aforementioned reductions.

73-78. (canceled)

79. The method of claim 66, wherein the anti-Gal3 antibody or binding fragment thereof comprises one or more of: TB001, TB006, 12G5.D7, 13A12.2E5, 14H10.2C9, 15F10.2D6, 19B5.2E6, 20D11.2C6, 20H5.A3, 23H9.2E4, 2D10.2B2, 3B11.2G2, 7D8.2D8, mIMT001, 4A11.2B5, 4A11.H1L1, 4A11.H4L2, 4G2.2G6, 6B3.2D3, 6H6.2D6, 9H2.2H10, 13G4.2F8, 13H12.2F8, 15G7.2A7, 19D9.2E5, 23B10.2B12, 24D12.2H9, F846C.1B2, F846C.1F5, F846C.1H12, F846C.1H5, F846C.2H3, F846TC.14A2, F846TC.14E4, F846TC.16B5, F846TC.7F10, F847C.10B9, F847C.11B1, F847C.12F12, F847C.26F5, F847C.4B10, F849C.8D10, F849C.8H3, 846.2B 11, 846.4D5, 846T.1H2, 847.14H4, 846.2D4, 846.2F11, 846T.10B1, 846T.2E3, 846T.4C9, 846T.4E11, 846T.4F5, 846T.8D1, 847.10C9, 847.11D6, 847.15D12, 847.15F9, 847.15H11, 847.20H7, 847.21B11, 847.27B9, 847.28D1, 847.2B8, 847.3B3, 849.1D2, 849.2D7, 849.2F12, 849.4B2, 849.4F12, 849.4F2, 849.5C2, 849.8D12, F847C.21H6, 849.5H1, 847.23F11, 847.16D10, 847.13E2-mH0mL1, 847.13E2-mH0mL2, 847.12C4, 847.4D3, 2D10-VH0-VL0, 2D10-hVH4-HVL1, 2D10-hVH4-HVL2, 2D10-hVH4-HVL3, 2D10-hVH4-HVL4, 2D10-hVH3-HVL1, 2D10-hVH3-HVL2, 2D10-hVH3-HVL3, 2D10-hVH3-HVL4, 20H5.A3-VH3VL1, 20H5.A3-VH3VL3, 20H5.A3-VH4VL1, 20H5.A3-VH5VL1, 20H5.A3-VH5VL3, 20H5.A3-VH6VL1, 20H5.A3-VH6VL3, or binding fragment thereof.

80-84. (canceled)

85. A method comprising administering 5 unit doses of an anti-Gal3 antibody or binding fragment thereof, wherein each unit dose comprise 1000 mg or about 1000 mg of the anti-Gal3 antibody or binding fragment thereof, wherein the unit doses are administered every 7 days or about 7 days, and wherein each unit dose is administered over the course of 1 hour or about 1 hour.

86. The method of claim 85, wherein the anti-Gal3 antibody or binding fragment thereof is TB006 or a binding fragment thereof.

87-89. (canceled)

90. A single-use sealed injectable glass vial comprising 8 mL of 20 mg/mL of an anti-Gal antibody or binding fragment thereof, optionally wherein the anti-Gal3 antibody or binding fragment thereof is TB006 or a binding fragment thereof.

91. An IV infusion bag comprising 1000 mg or about 1000 mg of an anti-Gal3 antibody or binding fragment thereof dissolved in 250 mL or about 250 mL of saline, optionally wherein the anti-Gal3 antibody or binding fragment thereof is TB006 or a binding fragment thereof.

The application's sequence listing, which the Patent Office published only in electronic form, follows.

SEQUENCE LISTING (940 sequences)

SEQ ID NO: 1 - protein, 250 aa, Homo sapiens [sequence omitted]

SEQ ID NO: 2 - protein, 264 aa, Homo sapiens
MHSKTPCGCFKPWKMADNFSLHDALSGSGNPNPQGWPGAWGNQPAGAGGYPGASYPGAYPGQAPPGAYPGQAPPGAYPGAPGAYPGAPAPGVYPGPPSGPGAYPSSGQPSATGAYPATGPYGAPAGPLIVPYNLPLPGGVVPRMLITILGTVKPNANRIALDFQRGNDVAFHFNPRFNENNRRVIVCNTKLDNNWGREERQSVFPFESGKPFKIQVLVEPDHFKVAVNDAHLLQYNHRVKKLNEISKLGISGDIDLTSASYTMI

SEQ ID NO: 3 - protein, 20 aa, synthetic construct
  REGION 1..20: note = Gal3 Peptide 1
ADNFSLHDALSGSGNPNPQG

SEQ ID NO: 4 - protein, 20 aa, synthetic construct
  REGION 1..20: note = Gal3 Peptide 2
SGSGNPNPQGWPGAWGNQPA

SEQ ID NO: 5 - protein, 20 aa, synthetic construct
  REGION 1..20: note = Gal3 Peptide 3
WPGAWGNQPAGAGGYPGASY

SEQ ID NO: 6 - protein, 20 aa, synthetic construct
  REGION 1..20: note = Gal3 Peptide 4
GAGGYPGASYPGAYPGQAPP

SEQ ID NO: 7 - protein, 20 aa, synthetic construct
  REGION 1..20: note = Gal3 Peptide 5
PGAYPGQAPPGAYPGQAPPG

SEQ ID NO: 8 - protein, 20 aa, synthetic construct
  REGION 1..20: note = Gal3 Peptide 6
GAYPGQAPPGAYPGAPGAYP

SEQ ID NO: 9 - protein, 20 aa, synthetic construct
  REGION 1..20: note = Gal3 Peptide 7
AYPGAPGAYPGAPAPGVYPG

SEQ ID NO: 10 - protein, 20 aa, synthetic construct
  REGION 1..20: note = Gal3 Peptide 8
GAPAPGVYPGPPSGPGAYPS

SEQ ID NO: 11 - protein, 20 aa, synthetic construct
  REGION 1..20: note = Gal3 Peptide 9
PPSGPGAYPSSGQPSATGAY

SEQ ID NO: 12 - protein, 20 aa, synthetic construct
  REGION 1..20: note = Gal3 Peptide 10
SGQPSATGAYPATGPYGAPA

SEQ ID NO: 13 - protein, 20 aa, synthetic construct
  REGION 1..20: note = Gal3 Peptide 11
PATGPYGAPAGPLIVPYNLP

SEQ ID NO: 14 - protein, 20 aa, synthetic construct
  REGION 1..20: note = Gal3 Peptide 12
GPLIVPYNLPLPGGVVPRML

SEQ ID NO: 15 - protein, 20 aa, synthetic construct
  REGION 1..20: note = Gal3 Peptide 13
LPGGVVPRMLITILGTVKPN

SEQ ID NO: 16 - protein, 20 aa, synthetic construct
  REGION 1..20: note = Gal3 Peptide 14
ITILGTVKPNANRIALDFQR

SEQ ID NO: 17 - protein, 20 aa, synthetic construct
  REGION 1..20: note = Gal3 Peptide 15
ANRIALDFQRGNDVAFHFNP

SEQ ID NO: 18 - protein, 20 aa, synthetic construct
  REGION 1..20: note = Gal3 Peptide 16
GNDVAFHFNPRFNENNRRVI

SEQ ID NO: 19 - protein, 20 aa, synthetic construct
  REGION 1..20: note = Gal3 Peptide 17
RFNENNRRVIVCNTKLDNNW

SEQ ID NO: 20 - protein, 20 aa, synthetic construct
  REGION 1..20: note = Gal3 Peptide 18
VCNTKLDNNWGREERQSVFP

SEQ ID NO: 21 - protein, 20 aa, synthetic construct
  REGION 1..20: note = Gal3 Peptide 19
GREERQSVFPFESGKPFKIQ

SEQ ID NO: 22 - protein, 20 aa, synthetic construct
  REGION 1..20: note = Gal3 Peptide 20
FESGKPFKIQVLVEPDHFKV

SEQ ID NO: 23 - protein, 20 aa, synthetic construct
  REGION 1..20: note = Gal3 Peptide 21
VLVEPDHFKVAVNDAHLLQY

SEQ ID NO: 24 - protein, 20 aa, synthetic construct
  REGION 1..20: note = Gal3 Peptide 22
AVNDAHLLQYNHRVKKLNEI

SEQ ID NO: 25 - protein, 20 aa, synthetic construct
  REGION 1..20: note = Gal3 Peptide 23
NHRVKKLNEISKLGISGDID

SEQ ID NO: 26 - protein, 19 aa, synthetic construct
  REGION 1..19: note = Gal3 Peptide 24
SKLGISGDIDLTSASYTMI

SEQ ID NO: 27 - protein, 7 aa, synthetic construct
  REGION 1..7: note = VH_CDR1_1
GYTFTNY

SEQ ID NO: 28 - protein, 7 aa, synthetic construct
  REGION 1..7: note = VH_CDR1_2
GFSLTSY

SEQ ID NO: 29 - protein, 8 aa, synthetic construct
  REGION 1..8: note = VH_CDR1_3
GYTFTNYW

SEQ ID NO: 30 - protein, 8 aa, synthetic construct
  REGION 1..8: note = VH_CDR1_4
GYTFTNYG

SEQ ID NO: 31 - protein, 7 aa, synthetic construct
  REGION 1..7: note = VH_CDR1_5
GYSFTNY

SEQ ID NO: 32 - protein, 7 aa, synthetic construct
  REGION 1..7: note = VH_CDR1_6
GYTFTDY

SEQ ID NO: 33 - protein, 7 aa, synthetic construct
  REGION 1..7: note = VH_CDR1_7
GYKFKTY

SEQ ID NO: 34 - protein, 7 aa, synthetic construct
  REGION 1..7: note = VH_CDR1_8
GYTFTTY

SEQ ID NO: 35 - protein, 7 aa, synthetic construct
  REGION 1..7: note = VH_CDR1_9
GFAFSSY

SEQ ID NO: 36 - protein, 7 aa, synthetic construct
  REGION 1..7: note = VH_CDR1_10
GYTFTDF

SEQ ID NO: 37 - protein, 7 aa, synthetic construct
  REGION 1..7: note = VH_CDR1_11
GYAFTTY

SEQ ID NO: 38 - protein, 7 aa, synthetic construct
  REGION 1..7: note = VH_CDR1_12
GFTFSSY

SEQ ID NO: 39 - protein, 8 aa, synthetic construct
  REGION 1..8: note = VH_CDR1_13
GFSLTSYG

SEQ ID NO: 40 - protein, 7 aa, synthetic construct
  REGION 1..7: note = VH_CDR1_14
GYTFTSY

SEQ ID NO: 41 - protein, 7 aa, synthetic construct
  REGION 1..7: note = VH_CDR1_15
GYTFSDY

SEQ ID NO: 42 - protein, 8 aa, synthetic construct
  REGION 1..8: note = VH_CDR1_16
GYTFTNFG

SEQ ID NO: 43 - protein, 8 aa, synthetic construct
  REGION 1..8: note = VH_CDR1_17
GFTFSSYA

SEQ ID NO: 44 - protein, 10 aa, synthetic construct
  REGION 1..10: note = VH_CDR1_18
GFSLSTSGMG

SEQ ID NO: 45 - protein, 8 aa, synthetic construct
  REGION 1..8: note = VH_CDR1_19
GFTFSNYG

SEQ ID NO: 46 - protein, 8 aa, synthetic construct
  REGION 1..8: note = VH_CDR1_20
GYIFTNYG

SEQ ID NO: 47 - protein, 8 aa, synthetic construct
  REGION 1..8: note = VH_CDR1_21
GNTFTDHN

SEQ ID NO: 48 - protein, 8 aa, synthetic construct
  REGION 1..8: note = VH_CDR1_22
GYTFTSYW

SEQ ID NO: 49 - protein, 10 aa, synthetic construct
  REGION 1..10: note = VH_CDR1_23
GFSLSTFGMG

SEQ ID NO: 50 - protein, 8 aa, synthetic construct
  REGION 1..8: note = VH_CDR1_24
GYTFTSYD

SEQ ID NO: 51 - protein, 8 aa, synthetic construct
  REGION 1..8: note = VH_CDR1_25
GFTFSNYW

SEQ ID NO: 52 - protein, 8 aa, synthetic construct
  REGION 1..8: note = VH_CDR1_26
GYTFTSYV

SEQ ID NO: 53 - protein, 8 aa, synthetic construct
  REGION 1..8: note = VH_CDR1_27
GYSFTNYI

SEQ ID NO: 54 - protein, 8 aa, synthetic construct
  REGION 1..8: note = VH_CDR1_28
GYTFRSYD

SEQ ID NO: 55 - protein, 8 aa, synthetic construct
  REGION 1..8: note = VH_CDR1_29
GFTFSNFW

SEQ ID NO: 56 - protein, 8 aa, synthetic construct
  REGION 1..8: note = VH_CDR1_30
EYAFNNYM

SEQ ID NO: 57 - protein, 8 aa, synthetic construct
  REGION 1..8: note = VH_CDR1_31
GYSFTGYT

SEQ ID NO: 58 - protein, 8 aa, synthetic construct
  REGION 1..8: note = VH_CDR1_32
GFSLINYG

SEQ ID NO: 59 - protein, 8 aa, synthetic construct
  REGION 1..8: note = VH_CDR1_33
GYTFNNYW

SEQ ID NO: 60 - protein, 8 aa, synthetic construct
  REGION 1..8: note = VH_CDR1_34
GFSLSSYG

SEQ ID NO: 61 - protein, 8 aa, synthetic construct
  REGION 1..8: note = VH_CDR1_35
GYSFTNYW

SEQ ID NO: 62 - protein, 8 aa, synthetic construct
  REGION 1..8: note = VH_CDR1_36
GYSFTSYW

SEQ ID NO: 63 - protein, 9 aa, synthetic construct
  REGION 1..9: note = VH_CDR1_37
GYSITSGYY

SEQ ID NO: 64 - protein, 8 aa, synthetic construct
  REGION 1..8: note = VH_CDR1_38
GFNIKDYY

SEQ ID NO: 65 - protein, 8 aa, synthetic construct
  REGION 1..8: note = VH_CDR1_39
RYTFTDYN

SEQ ID NO: 66 - protein, 8 aa, synthetic construct
  REGION 1..8: note = VH_CDR1_40
GYTFTIFG

SEQ ID NO: 67 - protein, 8 aa, synthetic construct
  REGION 1..8: note = VH_CDR1_41
GYTFTSSW

SEQ ID NO: 68 - protein, 8 aa, synthetic construct
  REGION 1..8: note = VH_CDR1_42
GYTFTGYW

SEQ ID NO: 69 - protein, 8 aa, synthetic construct
  REGION 1..8: note = VH_CDR1_43
GYSFTDYN

SEQ ID NO: 70 - protein, 8 aa, synthetic construct
  REGION 1..8: note = VH_CDR1_44
GFSLTIYG

SEQ ID NO: 71 - protein, 6 aa, synthetic construct
  REGION 1..6: note = VH_CDR2_1
NTNTGE

SEQ ID NO: 72 - protein, 8 aa, synthetic construct
  REGION 1..8: note = VH_CDR2_2
IYPGSGNT

SEQ ID NO: 73 - protein, 8 aa, synthetic construct
  REGION 1..8: note = VH_CDR2_3
IYPGTGNT

SEQ ID NO: 74 - protein, 8 aa, synthetic construct
  REGION 1..8: note = VH_CDR2_4
INTYSGVP

SEQ ID NO: 75 - protein, 8 aa, synthetic construct
  REGION 1..8: note = VH_CDR2_5
ISDGGVYT

SEQ ID NO: 76 - protein, 8 aa, synthetic construct
  REGION 1..8: note = VH_CDR2_6
INPKNGGI

SEQ ID NO: 77 - protein, 8 aa, synthetic construct
  REGION 1..8: note = VH_CDR2_7
VNTYSGVP

SEQ ID NO: 78 - protein, 8 aa, synthetic construct
  REGION 1..8: note = VH_CDR2_8
IYPGSNDT

SEQ ID NO: 79 - protein, 8 aa, synthetic construct
  REGION 1..8: note = VH_CDR2_9
ISDGGIYT

SEQ ID NO: 80 - protein, 8 aa, synthetic construct
  REGION 1..8: note = VH_CDR2_10
INTHSGVP

SEQ ID NO: 81 - protein, 7 aa, synthetic construct
  REGION 1..7: note = VH_CDR2_11
IWSGGST

SEQ ID NO: 82 - protein, 8 aa, synthetic construct
  REGION 1..8: note = VH_CDR2_12
IDPSDSET

SEQ ID NO: 83 - protein, 8 aa, synthetic construct
  REGION 1..8: note = VH_CDR2_13
IHPNSGST

SEQ ID NO: 84 - protein, 8 aa, synthetic construct
  REGION 1..8: note = VH_CDR2_14
INPNNGGT

SEQ ID NO: 85 - protein, 8 aa, synthetic construct
  REGION 1..8: note = VH_CDR2_15
IYPVSVNT

SEQ ID NO: 86 - protein, 8 aa, synthetic construct
  REGION 1..8: note = VH_CDR2_16
INTYTGEP

SEQ ID NO: 87 - protein, 7 aa, synthetic construct
  REGION 1..7: note = VH_CDR2_17
ISSGGDT

SEQ ID NO: 88 - protein, 7 aa, synthetic construct
  REGION 1..7: note = VH_CDR2_18
IWWDDDK

SEQ ID NO: 89 - protein, 8 aa, synthetic construct
  REGION 1..8: note = VH_CDR2_19
ISSGGSYT

SEQ ID NO: 90 - protein, 8 aa, synthetic construct
  REGION 1..8: note = VH_CDR2_20
IYPYNGGT

SEQ ID NO: 91 - protein, 7 aa, synthetic construct
  REGION 1..7: note = VH_CDR2_21
ISSGGST

SEQ ID NO: 92 - protein, 8 aa, synthetic construct
  REGION 1..8: note = VH_CDR2_22
IYPGSSSI

SEQ ID NO: 93 - protein, 8 aa, synthetic construct
  REGION 1..8: note = VH_CDR2_23
IYPGDGST

SEQ ID NO: 94 - protein, 10 aa, synthetic construct
  REGION 1..10: note = VH_CDR2_24
IRLKSNNYAT

SEQ ID NO: 95 - protein, 8 aa, synthetic construct
  REGION 1..8: note = VH_CDR2_25
INTNTGES

SEQ ID NO: 96 - protein, 10 aa, synthetic construct
  REGION 1..10: note = VH_CDR2_26
LRLKSNNYAT

SEQ ID NO: 97 - protein, 8 aa, synthetic construct
  REGION 1..8: note = VH_CDR2_27
INPYNDGT

SEQ ID NO: 98 - protein, 8 aa, synthetic construct
  REGION 1..8: note = VH_CDR2_28
IFPGEGIS

SEQ ID NO: 99 - protein, 8 aa, synthetic construct
  REGION 1..8: note = VH_CDR2_29
IFPGDGTT

SEQ ID NO: 100 - protein, 8 aa, synthetic construct
  REGION 1..8: note = VH_CDR2_30
INPGSGAT

SEQ ID NO: 101 - protein, 8 aa, synthetic construct
  REGION 1..8: note = VH_CDR2_31
INPYNGGT

SEQ ID NO: 102 - protein, 8 aa, synthetic construct
  REGION 1..8: note = VH_CDR2_32
FLPGDGSS

SEQ ID NO: 103 - protein, 7 aa, synthetic construct
  REGION 1..7: note = VH_CDR2_33
IWAGGST

SEQ ID NO: 104 - protein, 8 aa, synthetic construct
  REGION 1..8: note = VH_CDR2_34
INTNTGEP

SEQ ID NO: 105 - protein, 7 aa, synthetic construct
  REGION 1..7: note = VH_CDR2_35
ISYDGRN

SEQ ID NO: 106 - protein, 8 aa, synthetic construct
  REGION 1..8: note = VH_CDR2_36
IYPEDDET

SEQ ID NO: 107 - protein, 8 aa, synthetic construct
  REGION 1..8: note = VH_CDR2_37
IYPNNGGT

SEQ ID NO: 108 - protein, 8 aa, synthetic construct
  REGION 1..8: note = VH_CDR2_38
VNTYTGEP

SEQ ID NO: 109 - protein, 8 aa, synthetic construct
  REGION 1..8: note = VH_CDR2_39
IDPYNDAT

SEQ ID NO: 110 - protein, 7 aa, synthetic construct
  REGION 1..7: note = VH_CDR2_40
VAWDDKK

SEQ ID NO: 111 - protein, 7 aa, synthetic construct
  REGION 1..7: note = VH_CDR2_41
ISSGDSP

SEQ ID NO: 112 - protein, 9 aa, synthetic construct
  REGION 1..9: note = VH_CDR3_1
APYDNFFAY

SEQ ID NO: 113 - protein, 9 aa, synthetic construct
  REGION 1..9: note = VH_CDR3_2
STAPGGFDV

SEQ ID NO: 114 - protein, 15 aa, synthetic construct
  REGION 1..15: note = VH_CDR3_3
ARFAYYYGSGGYFDY

SEQ ID NO: 115 - protein, 12 aa, synthetic construct
  REGION 1..12: note = VH_CDR3_4
ARDGNYGDPMDY

SEQ ID NO: 116 - protein, 10 aa, synthetic construct
  REGION 1..10: note = VH_CDR3_5
STPYEYDGAY

SEQ ID NO: 117 - protein, 6 aa, synthetic construct
  REGION 1..6: note = VH_CDR3_6
VRDGGY

SEQ ID NO: 118 - protein, 9 aa, synthetic construct
  REGION 1..9: note = VH_CDR3_7
ARGPYAMDY

SEQ ID NO: 119 - protein, 8 aa, synthetic construct
  REGION 1..8: note = VH_CDR3_8
TSGYGFPY

SEQ ID NO: 120 - protein, 13 aa, synthetic construct
  REGION 1..13: note = VH_CDR3_9
ANYFGCSGWFFDV

SEQ ID NO: 121 - protein, 12 aa, synthetic construct
  REGION 1..12: note = VH_CDR3_10
TRDGNDGDAMDN

SEQ ID NO: 122 - protein, 14 aa, synthetic construct
  REGION 1..14: note = VH_CDR3_11
AKGPYDYDLGWFAY

SEQ ID NO: 123 - protein, 8 aa, synthetic construct
  REGION 1..8: note = VH_CDR3_12
ARHGYYDY

SEQ ID NO: 124 - protein, 12 aa, synthetic construct
  REGION 1..12: note = VH_CDR3_13
TRWGIYYYARDY

SEQ ID NO: 125 - protein, 10 aa, synthetic construct
  REGION 1..10: note = VH_CDR3_14
AVPYEYDGAY

SEQ ID NO: 126 - protein, 10 aa, synthetic construct
  REGION 1..10: note = VH_CDR3_15
ATPYEYDGAY

SEQ ID NO: 127 - protein, 5 aa, synthetic construct
  REGION 1..5: note = VH_CDR3_16
AYLDY

SEQ ID NO: 128 - protein, 14 aa, synthetic construct
  REGION 1..14: note = VH_CDR3_17
AKSPDGYDVAWFGY

SEQ ID NO: 129 - protein, 15 aa, synthetic construct
  REGION 1..15: note = VH_CDR3_18
ARWGGYAGDYYAMDF

SEQ ID NO: 130 - protein, 15 aa, synthetic construct
  REGION 1..15: note = VH_CDR3_19
ARWGGYDGDYYAMDY

SEQ ID NO: 131 - protein, 15 aa, synthetic construct
  REGION 1..15: note = VH_CDR3_20
ARWGGYAGDYYAMDY

SEQ ID NO: 132 - protein, 10 aa, synthetic construct
  REGION 1..10: note = VH_CDR3_21
ASYGNSLFDY

SEQ ID NO: 133 - protein, 7 aa, synthetic construct
  REGION 1..7: note = VH_CDR3_22
VRYTMDY

SEQ ID NO: 134 - protein, 16 aa, synthetic construct
  REGION 1..16: note = VH_CDR3_23
ARNLYDGSYGYYAMDY

SEQ ID NO: 135 - protein, 16 aa, synthetic construct
  REGION 1..16: note = VH_CDR3_24
ARHAHYYGVSPYYFDY

SEQ ID NO: 136 - protein, 12 aa, synthetic construct
  REGION 1..12: note = VH_CDR3_25
AKFGNYVGAMDY

SEQ ID NO: 137 - protein, 13 aa, synthetic construct
  REGION 1..13: note = VH_CDR3_26
ARGEYDYLAWFAY

SEQ ID NO: 138 - protein, 11 aa, synthetic construct
  REGION 1..11: note = VH_CDR3_27
TRFTTVVEMDY

SEQ ID NO: 139 - protein, 5 aa, synthetic construct
  REGION 1..5: note = VH_CDR3_28
ARWGY

SEQ ID NO: 140 - protein, 13 aa, synthetic construct
  REGION 1..13: note = VH_CDR3_29
ARIDYGDYVGFAY

SEQ ID NO: 141 - protein, 11 aa, synthetic construct
  REGION 1..11: note = VH_CDR3_30
AREAASNAMDY

SEQ ID NO: 142 - protein, 13 aa, synthetic construct
  REGION 1..13: note = VH_CDR3_31
TRHYGFPYWYFDV

SEQ ID NO: 143 - protein, 11 aa, synthetic construct
  REGION 1..11: note = VH_CDR3_32
QPGGVTGTLTT

SEQ ID NO: 144 - protein, 7 aa, synthetic construct
  REGION 1..7: note = VH_CDR3_33
ARYPMDY

SEQ ID NO: 145 - protein, 11 aa, synthetic construct
  REGION 1..11: note = VH_CDR3_34
ARLLFYYAMDY

SEQ ID NO: 146 - protein, 11 aa, synthetic construct
  REGION 1..11: note = VH_CDR3_35
AREATAGAMDY

SEQ ID NO: 147 - protein, 11 aa, synthetic construct
  REGION 1..11: note = VH_CDR3_36
AREGAGSWFAY

SEQ ID NO: 148 - protein, 7 aa, synthetic construct
  REGION 1..7: note = VH_CDR3_37
TYNDLGY

SEQ ID NO: 149 - protein, 16 aa, synthetic construct
  REGION 1..16: note = VH_CDR3_38
ARKDDYYGSSPYALDY

SEQ ID NO: 150 - protein, 9 aa, synthetic construct
  REGION 1..9: note = VH_CDR3_39
VRDDYDSDY

SEQ ID NO: 151 - protein, 14 aa, synthetic construct
  REGION 1..14: note = VH_CDR3_40
ARIYYYGRGYAMDY

SEQ ID NO: 152 - protein, 15 aa, synthetic construct
  REGION 1..15: note = VH_CDR3_41
ARGDYYYGTRGPMDY

SEQ ID NO: 153 - protein, 8 aa, synthetic construct
  REGION 1..8: note = VH_CDR3_42
ARWGAMDY

SEQ ID NO: 154 - protein, 15 aa, synthetic construct
  REGION 1..15: note = VH_CDR3_43
ARDRASLLRPGAMDY

SEQ ID NO: 155 - protein, 11 aa, synthetic construct
  REGION 1..11: note = VH_CDR3_44
ARLDYDYDEDY

SEQ ID NO: 156 - protein, 14 aa, synthetic construct
  REGION 1..14: note = VH_CDR3_45
ASPPSGYDYDVFAS

SEQ ID NO: 157 - protein, 14 aa, synthetic construct
  REGION 1..14: note = VH_CDR3_46
ASPPSGYDYDVFAY

SEQ ID NO: 158 - protein, 14 aa, synthetic construct
  REGION 1..14: note = VH_CDR3_47
AKPPYDYDGAWFAY

SEQ ID NO: 159 - protein, 7 aa, synthetic construct
  REGION 1..7: note = VH_CDR3_48
ATGRPDY

SEQ ID NO: 160 - protein, 7 aa, synthetic construct
  REGION 1..7: note = VH_CDR3_49
AKGRPDY

SEQ ID NO: 161 - protein, 11 aa, synthetic construct
  REGION 1..11: note = VH_CDR3_50
AGYDFLWYFDV

SEQ ID NO: 162 - protein, 12 aa, synthetic construct
  REGION 1..12: note = VH_CDR3_51
ARSGGYYVWFAY

SEQ ID NO: 163 - protein, 14 aa, synthetic construct
  REGION 1..14: note = VH_CDR3_52
ARSYYDGSYDAMDY

SEQ ID NO: 164 - protein, 7 aa, synthetic construct
  REGION 1..7: note = VH_CDR3_53
ARGWFAY

SEQ ID NO: 165 - protein, 14 aa, synthetic construct
  REGION 1..14: note = VH_CDR3_54
AKPPHDYDQAWFAY

SEQ ID NO: 166 - protein, 9 aa, synthetic construct
  REGION 1..9: note = VH_CDR3_55
VNSNYESGY

SEQ ID NO: 167 - protein, 9 aa, synthetic construct
  REGION 1..9: note = VH_CDR3_56
ANSNYASGS

SEQ ID NO: 168 - protein, 13 aa, synthetic construct
  REGION 1..13: note = VH_CDR3_57
ARWGRYEYYAMDY

SEQ ID NO: 169 - protein, 9 aa, synthetic construct
  REGION 1..9: note = VH_CDR3_58
TMTGGPINY

SEQ ID NO: 170 - protein, 16 aa, synthetic construct
  REGION 1..16: note = VL-CDR1_1
RSSKSLLYKDGKTYLN

SEQ ID NO: 171 - protein, 11 aa, synthetic construct
  REGION 1..11: note = VL-CDR1_2
KSLLHSDGITY

SEQ ID NO: 172 - protein, 6 aa, synthetic construct
  REGION 1..6: note = VL-CDR1_3
QGINSN

SEQ ID NO: 173 - protein, 11 aa, synthetic construct
  REGION 1..11: note = VL-CDR1_4
QSLLYTNGKTY

SEQ ID NO: 174 - protein, 11 aa, synthetic construct
  REGION 1..11: note = VL-CDR1_5
QSLFDSDGKTY

SEQ ID NO: 175 - protein, 11 aa, synthetic construct
  REGION 1..11: note = VL-CDR1_6
QSIVHNNGNTY

SEQ ID NO: 176 - protein, 6 aa, synthetic construct
  REGION 1..6: note = VL-CDR1_7
QGINNY

SEQ ID NO: 177 - protein, 6 aa, synthetic construct
  REGION 1..6: note = VL-CDR1_8
QNIYIW

SEQ ID NO: 178 - protein, 6 aa, synthetic construct
  REGION 1..6: note = VL-CDR1_9
QDISNY

SEQ ID NO: 179 - protein, 11 aa, synthetic construct
  REGION 1..11: note = VL-CDR1_10
QSIVHSNGNTY

SEQ ID NO: 180 - protein, 11 aa, synthetic construct
  REGION 1..11: note = VL-CDR1_11
QSLLYTDGKTY

SEQ ID NO: 181 - protein, 6 aa, synthetic construct
  REGION 1..6: note = VL-CDR1_12
QSVSND

SEQ ID NO: 182 - protein, 6 aa, synthetic construct
  REGION 1..6: note = VL-CDR1_13
QGISNY

SEQ ID NO: 183 - protein, 6 aa, synthetic construct
  REGION 1..6: note = VL-CDR1_14
QDVSTA

SEQ ID NO: 184 - protein, 6 aa, synthetic construct
  REGION 1..6: note = VL-CDR1_15
QNVGTN

SEQ ID NO: 185 - protein, 11 aa, synthetic construct
  REGION 1..11: note = VL-CDR1_16
QSLFHSDGKTY

SEQ ID NO: 186 - protein, 6 aa, synthetic construct
  REGION 1..6: note = VL-CDR1_17
QNINIW

SEQ ID NO: 187 - protein, 11 aa, synthetic construct
  REGION 1..11: note = VL-CDR1_18
QSLLHSDGKTY

SEQ ID NO: 188 - protein, 6 aa, synthetic construct
  REGION 1..6: note = VL-CDR1_19
QDVRTA

SEQ ID NO: 189 - protein, 12 aa, synthetic construct
  REGION 1..12: note = VL-CDR1_20
QSVLYSSNQKNY

SEQ ID NO: 190 - protein, 12 aa, synthetic construct
  REGION 1..12: note = VL-CDR1_21
QSVLYSSSQKNY

SEQ ID NO: 191 - protein, 11 aa, synthetic construct
  REGION 1..11: note = VL-CDR1_22
QSLVHNSGNTY

SEQ ID NO: 192 - protein, 9 aa, synthetic construct
  REGION 1..9: note = VL-CDR1_23
TGAVTTSNY

SEQ ID NO: 193 - protein, 11 aa, synthetic construct
  REGION 1..11: note = VL-CDR1_24
KSLLHTNGITF

SEQ ID NO: 194 - protein, 12 aa, synthetic construct
  REGION 1..12: note = VL-CDR1_25
QSLLNSSNQKNY

SEQ ID NO: 195 - protein, 6 aa, synthetic construct
  REGION 1..6: note = VL-CDR1_26
QNINVW

SEQ ID NO: 196 - protein, 6 aa, synthetic construct
  REGION 1..6: note = VL-CDR1_27
IDIDDD

SEQ ID NO: 197 - protein, 11 aa, synthetic construct
  REGION 1..11: note = VL-CDR1_28
QDIVHSSGNTY

SEQ ID NO: 198 - protein, 11 aa, synthetic construct
  REGION 1..11: note = VL-CDR1_29
KSLLYSNGITY

SEQ ID NO: 199 - protein, 10 aa, synthetic construct
  REGION 1..10: note = VL-CDR1_30
KSVSTSGYSY

SEQ ID NO: 200 - protein, 10 aa, synthetic construct
  REGION 1..10: note = VL-CDR1_31
ESVDSYGNSF

SEQ ID NO: 201 - protein, 11 aa, synthetic construct
  REGION 1..11: note = VL-CDR1_32
QSLLYSNGKTY

SEQ ID NO: 202 - protein, 6 aa, synthetic construct
  REGION 1..6: note = VL-CDR1_33
QGISSN

SEQ ID NO: 203 - protein, 10 aa, synthetic construct
  REGION 1..10: note = VL-CDR1_34
KSVSTSGYSC

SEQ ID NO: 204 - protein, 11 aa, synthetic construct
  REGION 1..11: note = VL-CDR1_35
QSLLYSDGKTY

SEQ ID NO: 205 - protein, 10 aa, synthetic construct
  REGION 1..10: note = VL-CDR1_36
ESVENHVNSF

SEQ ID NO: 206 - protein, 5 aa, synthetic construct
  REGION 1..5: note = VL-CDR1_37
SSVTY

SEQ ID NO: 207 - protein, 10 aa, synthetic construct
  REGION 1..10: note = VL-CDR1_38
ESLDNSGISF

SEQ ID NO: 208 - protein, 6 aa, synthetic construct
  REGION 1..6: note = VL-CDR1_39
QDVSTT

SEQ ID NO: 209 - protein, 6 aa, synthetic construct
  REGION 1..6: note = VL-CDR1_40
QNVGIN

SEQ ID NO: 210 - protein, 11 aa, synthetic construct
  REGION 1..11: note = VL-CDR1_41
QSLLDSDGKTY

SEQ ID NO: 211 - protein, 6 aa, synthetic construct
  REGION 1..6: note = VL-CDR1_42
GNIHNY

SEQ ID NO: 212 - protein, 6 aa, synthetic construct
  REGION 1..6: note = VL-CDR1_43
QSVSSD

SEQ ID NO: 213 - protein, 11 aa, synthetic construct
  REGION 1..11: note = VL-CDR1_44
QSLLYINGKTY

SEQ ID NO: 214 - protein, 11 aa, synthetic construct
  REGION 1..11: note = VL-CDR1_45
RSLLHSNGYTY

SEQ ID NO: 215 - protein, 11 aa, synthetic construct
  REGION 1..11: note = VL-CDR1_46
RSLLDSDGKTY

SEQ ID NO: 216 - protein, 6 aa, synthetic construct
  REGION 1..6: note = VL-CDR1_47
QDVSSV

SEQ ID NO: 217 - protein, 6 aa, synthetic construct
  REGION 1..6: note = VL-CDR1_48
QIINNN

SEQ ID NO: 218 - protein, 10 aa, synthetic construct
  REGION 1..10: note = VL-CDR1_49
KSVTTSAYSY

SEQ ID NO: 219 - protein, 11 aa, synthetic construct
  REGION 1..11: note = VL-CDR1_50
QSLLDRDGKTY

SEQ ID NO: 220 - protein, 6 aa, synthetic construct
  REGION 1..6: note = VL-CDR1_51
QSVSNE

SEQ ID NO: 221 - protein, 7 aa, synthetic construct
  REGION 1..7: note = VL-CDR2_1
LMSTHAS

SEQ ID NO: 222-247 - skipped (26 entries)

SEQ ID NO: 248 - protein, 9 aa, synthetic construct
  REGION 1..9: note = VL-CDR3_1
QQLVDYPLT

SEQ ID NO: 249 - protein, 9 aa, synthetic construct
  REGION 1..9: note = VL-CDR3_2
AQMLEFPLT

SEQ ID NO: 250 - protein, 9 aa, synthetic construct
  REGION 1..9: note = VL-CDR3_3
VQYAQFPPT

SEQ ID NO: 251 - protein, 9 aa, synthetic construct
  REGION 1..9: note = VL-CDR3_4
LQSTHFPLT

SEQ ID NO: 252 - protein, 9 aa, synthetic construct
  REGION 1..9: note = VL-CDR3_5
WQGTHFPLT

SEQ ID NO: 253 - protein, 9 aa, synthetic construct
  REGION 1..9: note = VL-CDR3_6
FQGSHVPLT

SEQ ID NO: 254 - protein, 9 aa, synthetic construct
  REGION 1..9: note = VL-CDR3_7
QQYSQVPYT

SEQ ID NO: 255 - protein, 9 aa, synthetic construct
  REGION 1..9: note = VL-CDR3_8
LQGQSYPLT

SEQ ID NO: 256 - protein, 9 aa, synthetic construct
  REGION 1..9: note = VL-CDR3_9
QQYSKLPYT

SEQ ID NO: 257 - protein, 9 aa, synthetic construct
  REGION 1..9: note = VL-CDR3_10
AQMIEFPLT

SEQ ID NO: 258 - protein, 9 aa, synthetic construct
  REGION 1..9: note = VL-CDR3_11
QQDYTSPYT

SEQ ID NO: 259 - protein, 9 aa, synthetic construct
  REGION 1..9: note = VL-CDR3_12
QQYSELPYT

SEQ ID NO: 260 - protein, 9 aa, synthetic construct
  REGION 1..9: note = VL-CDR3_13
QQHYTTPLT

SEQ ID NO: 261 - protein, 9 aa, synthetic construct
  REGION 1..9: note = VL-CDR3_14
EQYSNFPLT

SEQ ID NO: 262 - protein, 9 aa, synthetic construct
  REGION 1..9: note = VL-CDR3_15
QQYSSYPWT

SEQ ID NO: 263 - protein, 8 aa, synthetic construct
  REGION 1..8: note = VL-CDR3_16
HQYLSSLT

SEQ ID NO: 264 - protein, 9 aa, synthetic construct
  REGION 1..9: note = VL-CDR3_17
SQSTHVPPT

SEQ ID NO: 265 - protein, 9 aa, synthetic construct
  REGION 1..9: note = VL-CDR3_18
ALWYSNHWV

SEQ ID NO: 266 - protein, 9 aa, synthetic construct
  REGION 1..9: note = VL-CDR3_19
AQNLELPWT

SEQ ID NO: 267 - protein, 9 aa, synthetic construct
  REGION 1..9: note = VL-CDR3_20
QQHYSTPYT

SEQ ID NO: 268 - protein, 9 aa, synthetic construct
  REGION 1..9: note = VL-CDR3_21
QQGQSYPYT

SEQ ID NO: 269 - protein, 9 aa, synthetic construct
  REGION 1..9: note = VL-CDR3_22
LQSDNKPLT

SEQ ID NO: 270 - protein, 9 aa, synthetic construct
  REGION 1..9: note = VL-CDR3_23
ALWYSNHLV

SEQ ID NO: 271 - protein, 9 aa, synthetic construct
  REGION 1..9: note = VL-CDR3_24
FQGSHVPPT

SEQ ID NO: 272 - protein, 9 aa, synthetic construct
  REGION 1..9: note = VL-CDR3_25
QHSRELPLT

SEQ ID NO: 273 - protein, 9 aa, synthetic construct
  REGION 1..9: note = VL-CDR3_26
QQNNEDPWT

SEQ ID NO: 274 - protein, 9 aa, synthetic construct
  REGION 1..9: note = VL-CDR3_27
VQGTHFPQT

SEQ ID NO: 275 - protein, 9 aa, synthetic construct
  REGION 1..9: note = VL-CDR3_28
VQYDQFPWT

SEQ ID NO: 276 - protein, 9 aa, synthetic construct
  REGION 1..9: note = VL-CDR3_29
HHSTELPYT

SEQ ID NO: 277 - protein, 8 aa, synthetic construct
  REGION 1..8: note = VL-CDR3_30
VQGTHLPT

SEQ ID NO: 278 - protein, 9 aa, synthetic construct
  REGION 1..9: note = VL-CDR3_31
QQNNEVPYT

SEQ ID NO: 279 - protein, 9 aa, synthetic construct
  REGION 1..9: note = VL-CDR3_32
QQWSSNPLT

SEQ ID NO: 280 - protein, 9 aa, synthetic construct
  REGION 1..9: note = VL-CDR3_33
QHSKEVPWT

SEQ ID NO: 281 - protein, 9 aa, synthetic construct
  REGION 1..9: note = VL-CDR3_34
QQHYSPPFT

SEQ ID NO: 282 - protein, 9 aa, synthetic construct
  REGION 1..9: note = VL-CDR3_35
QQYNSYPYT

SEQ ID NO: 283 - protein, 9 aa, synthetic construct
  REGION 1..9: note = VL-CDR3_36
WQGTHFPFT

SEQ ID NO: 284 - protein, 9 aa, synthetic construct
  REGION 1..9: note = VL-CDR3_37
QHFWSIFPT

SEQ ID NO: 285 - protein, 9 aa, synthetic construct
  REGION 1..9: note = VL-CDR3_38
QHFWSLFPT

SEQ ID NO: 286 - protein, 9 aa, synthetic construct
  REGION 1..9: note = VL-CDR3_39
QHNYISPFT

SEQ ID NO: 287 - protein, 9 aa, synthetic construct
  REGION 1..9: note = VL-CDR3_40
QQHYNTPYT

SEQ ID NO: 288 - protein, 9 aa, synthetic construct
  REGION 1..9: note = VL-CDR3_41
LQSTHFPQT

SEQ ID NO: 289 - protein, 9 aa, synthetic construct
  REGION 1..9: note = VL-CDR3_42
MQHLEYPYT

SEQ ID NO: 290 - protein, 9 aa, synthetic construct
  REGION 1..9: note = VL-CDR3_43
QQYSKLPRT

SEQ ID NO: 291 - protein, 9 aa, synthetic construct
  REGION 1..9: note = VL-CDR3_44
WQGTHFPQT

SEQ ID NO: 292 - protein, 9 aa, synthetic construct
  REGION 1..9: note = VL-CDR3_45
QQGQSSPFT

SEQ ID NO: 293 - protein, 9 aa, synthetic construct
  REGION 1..9: note = VL-CDR3_46
QQTNSWPLT

SEQ ID NO: 294 - protein, 9 aa, synthetic construct
  REGION 1..9: note = VL-CDR3_47
QHNRELPPT

SEQ ID NO: 295 - protein, 8 aa, synthetic construct
  REGION 1..8: note = VL-CDR3_48
WQGTHFPT

SEQ ID NO: 296 - protein, 9 aa, synthetic construct
  REGION 1..9: note = VL-CDR3_49
QQHYSSPWT

SEQ ID NO: 297 - protein, 116 aa, synthetic construct
  REGION 1..116: note = VH-1 Peptide Sequence
QVQLVQSGSELKKPGASVKVSCKASGYTFTNYGMNWVRQAPGQGLKWMGWINTNTGEPTYVEEFTGRFVFSLETSVSTAYLQISSLKAEDTAVYFCAPYDNFFAYWGQGTTVTVSS

SEQ ID NO: 298 - protein, 116 aa, synthetic construct
  REGION 1..116: note = VH-2 Peptide Sequence
QVQLVQSGAEVKKPGASVKVSCKASGYSFTNYYMHWVRQAPGQRLEWMGWIYPGSGNTNYNEKFQGRVTITADTSASTAYMELSSLRSEDTAVYYCSTAPGGFDVWGQGTTVTVSS

SEQ ID NO: 299 - protein, 122 aa, synthetic construct
  REGION 1..122: note = VH-3 Peptide Sequence
QVQLKQSGAELVRPGASVKLSCKASGYTFTDYYINWVKQRPGQGLEWIARIYPGTGNTDYNEKFKGRATLTAEKSSSTAYMQLSSLTSEDSAVYFCARFAYYYGSGGYFDYWGHGTTLTVSS

SEQ ID NO: 300 - protein, 119 aa, synthetic construct
  REGION 1..119: note = VH-4 Peptide Sequence
QIQLVQSGPELKKPGETVKISCKTSGYKFKTYVMSWVKQAPGKALKWMGWINTYSGVPTYADDFKGRFAFSLETSASTAYLEIINLKNEDTATYFCARDGNYGDPMDYWGQGTSVTVSS

SEQ ID NO: 301 - protein, 117 aa, synthetic construct
  REGION 1..117: note = VH-5 Peptide Sequence
QIQLVQSGPELKKPGETVKISCKASGYTFTTYGMGWVKQAPGKDLKWMGWINTYSGVPTYADDFKGRFAFSLETSASTAYLQISNLKNEDTATYFCSTPYEYDGAYWGQGTLVTVSA

SEQ ID NO: 302 - protein, 113 aa, synthetic construct
  REGION 1..113: note = VH-6 Peptide Sequence
EVQLVESGGGLVKPGGSLKLSCAASGFAFSSYAMSWVRQTPEKRLEWVATISDGGVYTYYTDHVKGRFTISRDNAEDNLYLQMSHLKSEDTAMYYCVRDGGYWGQGTTLTVSS

SEQ ID NO: 303 - protein, 116 aa, synthetic construct
  REGION 1..116: note = VH-7 Peptide Sequence
QIQLVQSGPELKKPGETVKISCKASGYTFTTYAMSWVKQAPGKGLKWMGWINTYSGVPTYADDLKGRFAFSLETSASTAYLQINNLKNEDTATYFCARGPYAMDYWGQGTSVTVSS

SEQ ID NO: 304 - protein, 115 aa, synthetic construct
  REGION 1..115: note = VH-8 Peptide Sequence
EVQLQQSGPELVKPGASVKISCKASGYTFTDFYINWVKQSHGKSLEWIGDINPKNGGINYNPKFKIKATLTVDKSSSTSYMDLRGLTSEDSAVYYCTSGYGFPYWGQGTLVTVSA

SEQ ID NO: 305 - protein, 116 aa, synthetic construct
  REGION 1..116: note = VH-9 Peptide Sequence
QIQLVQSGPELKKPGESVKISCKASGYAFTTYGMSWVQQAPGKGLKWMGWVNTYSGVPTCADDFKGRFAFSLETSASTAYLQINNLRNEDTATYFCARGPYAMDYWGQGTSVTVSS

SEQ ID NO: 306 - protein, 120 aa, synthetic construct
  REGION 1..120: note = VH-10 Peptide Sequence
QVQLQQSGPELVKPGASVKISCKASGYTFTDYYINWVKQRPGQGLEWIGWIYPGSNDTKYNEKFKGKATLTVDTSSSTAYMQLGSLTSEDSAVYFCANYFGCSGWFFDVWGTGTTVTVSS

SEQ ID NO: 307 - protein, 113 aa, synthetic construct
  REGION 1..113: note = VH-11 Peptide Sequence
EVQLVESGGGLVKPGGSLKLSCAASGFTFSSYAMSWVRQTPEKRLEWVATISDGGIYTYYPDNVKGRFTISRDNAKNNLFLQMSHLKSEDTAMYYCVRDGGYWGQGTTLTVSS

SEQ ID NO: 308 - protein, 116 aa, synthetic construct
  REGION 1..116: note = VH-12 Peptide Sequence
QIQLVQSGPELKKPGETVKISCKASGYTFTNYGMNWVKQAPGKGLKWMGWINTNTGEPTYVEEFKGRFAFSLETSASTAYLQINNLKNEDTATYFCAPYDNFFAYWGQGTLVTVSA

SEQ ID NO: 309 - protein, 116 aa, synthetic construct
  REGION 1..116: note = VH-13 Peptide Sequence
QVQLQQSGPELVKPGASVKISCKASGYSFTNYYIHWVKQRPGQGLEWIGWIYPGSGNTNYNEKFKGKATLTADTSSSTTNMQLSSLTSEDSAVYYCSTAPGGFDVWGSGTTVTVSS

SEQ ID NO: 310 - protein, 116 aa, synthetic construct
  REGION 1..116: note = VH-14 Peptide Sequence
QVQLVQSGAEVKKPGASVKVSCKASGYSFTNYYMHWVRQAPGQGLEWMGWIYPGSGNTNYNEKFQGRVTMTADTSISTAYMELSRLRSDDTAVYYCSTAPGGFDVWGQGTTVTVSS

SEQ ID NO: 311 - protein, 116 aa, synthetic construct
  REGION 1..116: note = VH-15 Peptide Sequence
QVQLVQSGAEVKKPGASVKVSCKASGYSFTNYYIHWVRQAPGQRLEWMGWIYPGSGNTNYNEKFQGRVTLTADTSASTTYMELSSLRSEDTAVYYCSTAPGGFDVWGQGTTVTVSS

SEQ ID NO: 312 - protein, 119 aa, synthetic construct
  REGION 1..119: note = VH-16 Peptide Sequence
QIQLVQSGPDLKKPGETVKISCKASGYTFTTYVMSWVKQAPGKDLKWMGWINTHSGVPTYADDFKGRFDFSLETSANTAFLQINNLKNEDTATYFCTRDGNDGDAMDNWGQGTSVTVSS

SEQ ID NO: 313 - protein, 120 aa, synthetic construct
  REGION 1..120: note = VH-17 Peptide Sequence
QVQLKQSGPGLVQPSQSLSITCTVSGFSLTSYGVHWVRQPPGKGLEWLGVIWSGGSTDYNAAFISRLSISKDNSKSQVFFKMNSLQADDTAIYYCAKGPYDYDLGWFAYWGQGTLVTVSA

SEQ ID NO: 314 - protein, 116 aa, synthetic construct
  REGION 1..116: note = VH-18 Peptide Sequence
QIQLVQSGPELKKPGETVKISCKASGYTFTTYGMSWVKQAPGKGLKWMAWINTYSGVPTYADDFKGRFAFSLETSASTAYLQINNLTNEDTATYFCARGPYAMDYWGQGTSVTVSS

SEQ ID NO: 315 - protein, 115 aa, synthetic construct
  REGION 1..115: note = VH-19 Peptide Sequence
QVQLQQPGAELVGPGSSVKLSCKASGYTFTNYWIHWVKQRPLQGLEWIGNIDPSDSETHYNQKFKDKATLTVDKSSSTAYMQLSSLTSEDSAVYYCARHGYYDYWGQGTTLTVSS

SEQ ID NO: 316 - protein, 119 aa, synthetic construct
  REGION 1..119: note = VH-20 Peptide Sequence
QVQLQQPGAELVKPGASVKLSCKASGYTFTSYWMHWVKQRPGQGLEWIGMIHPNSGSTDYNEKFKNKATLNVDKSSSTAYIQLSSLTSEDSAVYYCTRWGIYYYARDYWGQGTTLTVSS

SEQ ID NO: 317 - protein, 117 aa, synthetic construct
  REGION 1..117: note = VH-21 Peptide Sequence
QIQLVQSGPELKKPGETVKISCKASGYTFTTYGMSWVKQAPGKGLKWMGWINTYSGVPTYADDFKGRFAFSLETSASTAYLQINNLKNEDTATYFCAVPYEYDGAYWGQGTLVTVSA

SEQ ID NO: 318 - protein, 115 aa, synthetic construct
  REGION 1..115: note = VH-22 Peptide Sequence
EVQLQQSGPELVKPGASVKISCKASGYTFTDYYMNWVKQSHGKSLEWIGDINPNNGGTNYNQKFKGKATLTVDKSSSTAYMELRSLTSEDSAVYYCTSGYGFPYWGQGTLVTVSA

SEQ ID NO: 319 - protein, 117 aa, synthetic construct
  REGION 1..117: note = VH-23 Peptide Sequence
QIQLVQSGPELKKPGETVKISCKASGYTFTTYGMGWVKQAPGKGLKWMGWINTYSGVPTYADDFKGRFAFSLETSTSTAYLQINNLKNEDMATYFCATPYEYDGAYWGQGTLVTVSA

SEQ ID NO: 320 - protein, 112 aa, synthetic construct
  REGION 1..112: note = VH-24 Peptide Sequence
QVQLQQSGPELVKPGDSVKISCKAAGYTFSDYYINWVKQRPGQGLEWIGWIYPVSVNTKYNEKFKGKATLTVDTSSSTAYMQLSSLTSEDSGVYFCAYLDYWGQGTLVTVSA

SEQ ID NO: 321 - protein, 120 aa, synthetic construct
  REGION 1..120: note = VH-25 Peptide Sequence
QVQLKQSGPGLVQPSQSLSITCTVSGFSLTSYGVHWVRQAPGKGLEWLGVIWSGGSTDYNAAFMSRLSISKDNSKSQVFFKMNSLQADDTAIYYCAKSPDGYDVAWFGYWGQGTLVTVSA

SEQ ID NO: 322 - protein, 122 aa, synthetic construct
  REGION 1..122: note = VH-26 Peptide Sequence
QIQLVQSGPELKKPGETVKISCKASGYTFTNYGMNWVKQAPGKGLKWMGWINTYTGEPSYADDFKGRFAFSLETSASTAYLQINNLKNEDMATYFCARWGGYAGDYYAMDFWGQGTSVTVSS

SEQ ID NO: 323 - protein, 122 aa, synthetic construct
  REGION 1..122: note = VH-27 Peptide Sequence
QIQLVQSGPELKKPGETVKISCKASGYTFTNYGMNWVKQAPGKGLKWMGWINTYTGEPSYADDFKGRFAFSLETSASTAYLQINNLKNEDMATYFCARWGGYDGDYYAMDYWGQGTSVTVSS

SEQ ID NO: 324 - protein, 122 aa, synthetic construct
  REGION 1..122: note = VH-28 Peptide Sequence
QIQLVQSGPELKKPGETVKISCKASGYTFTNFGMNWVKQAPGKGLKWMGWINTYTGEPSYADDFKGRFAFSLETSASTAYLQINNLKNEDIATYFCARWGGYAGDYYAMDYWGQGTSVTVSS

SEQ ID NO: 325 - protein, 116 aa, synthetic construct
  REGION 1..116: note = VH-29 Peptide Sequence
EVQLLESGGGLVKPGGSLKLSCAASGFTFSSYAMSWVRQTPEKRLEWVASISSGGDTYYPDSVKGRFTISRDNARNILYLQMSSLRSEDTAMYYCASYGNSLFDYWGQGTTLTVSS

SEQ ID NO: 326 - protein, 114 aa, synthetic construct
  REGION 1..114: note = VH-30 Peptide Sequence
QIQLVQSGPELKKPGETVKISCKASGYTFTNYGMNWVKQAPGKGLKWMGWINTYTGEPTYAGDLKGRFAFSLETSASTAYLQINNLKNEDTATYFCVRYTMDYWGQGTSVTVSS

SEQ ID NO: 327 - protein, 124 aa, synthetic construct
  REGION 1..124: note = VH-31 Peptide Sequence
QVTLKESGPGILQPSQTLSLTCSFSGFSLSTSGMGVGWIRQPSGKGLEWLAHIWWDDDKYYNTALKSGLTISKDASKNQVFLKIASMDTADTATYYCARNLYDGSYGYYAMDYWGQGTSVTVSS

SEQ ID NO: 328 - protein, 122 aa, synthetic construct
  REGION 1..122: note = VH-32 Peptide Sequence
QIQLVQSGPELKKPGETVKISCKASGYTFTNYGMNWVKQAPGKGLKWMGWINTYTGEPAYADDFKGRFAFSLETSASTAYLQINNLKNEDMATYFCARWGGYDGDYYAMDYWGQGTSVTVSS

SEQ ID NO: 329 - protein, 123 aa, synthetic construct
  REGION 1..123: note = VH-33 Peptide Sequence
EVQLVESGGDLVKPGGSLKLSCAASGFTFSNYGLSWIRQTPDKRLEWVATISSGGSYTYYPDSVKGRFTISRDSAKNTLYLQMSSLKSEDTAMYYCARHAHYYGVSPYYFDYWGQGTCLTVSS

SEQ ID NO: 330 - protein, 119 aa, synthetic construct
  REGION 1..119: note = VH-34 Peptide Sequence
QIQLVQSGPEVKKPGETVKISCKASGYIFTNYGMNWVKQAPGKGLKWMGWINTYTGEPTYTDDFKGRFAFSLETSASTAYLQINNLKNEDTATYFCAKFGNYVGAMDYWGQGTSVTVSS

SEQ ID NO: 331 - protein, 120 aa, synthetic construct
  REGION 1..120: note = VH-35 Peptide Sequence
EVQLQQSGPELVKPGASVKISCKASGNTFTDHNMHWVKQSHGKSLEWIGYIYPYNGGTGYNQKFKSKATLTVDNSSSTVYMELRSLTSEDSAVYYCARGEYDYLAWFAYWGQGTLVTVSA

SEQ ID NO: 332 - protein, 119 aa, synthetic construct
  REGION 1..119: note = VH-36 Peptide Sequence
QIQLVQSGPELKKPGETVKISCKASGYTFTNYGMNWVKQAPGKGLKWMGWINTYTGEPTYVDDFKGRFAFSLETSASTAYLRINNLKNEDTATYFCAKFGNYVGAMDYWGQGTSVTVSS

SEQ ID NO: 333 - protein, 117 aa, synthetic construct
  REGION 1..117: note = VH-37 Peptide Sequence
EVQLVETGGGLVKPGGSLKLSCAASGFTFSSYAMSWVRQTPEKRLEWVASISSGGSTYYPDSVKGRFTISRDNARNILYLQMSSLRSEDTAMYYCTRFTTVVEMDYWGQGTSVTVSS

SEQ ID NO: 334 - protein, 112 aa, synthetic construct
  REGION 1..112: note = VH-38 Peptide Sequence
QVQLQQTGAELVKPGASVKLSCKASGYTFTSYWINWVKQRPGQGLEWIGNIYPGSSSIYYSEKFKSKATLTVDTSSSTAYMQLSSLTSDDSAVYYCARWGYWGQGTTLTVSS

SEQ ID NO: 335 - protein, 121 aa, synthetic construct
  REGION 1..121: note = VH-39 Peptide Sequence
QVTLKESGPGILQPSQTLSLTCSFSGFSLSTFGMGVGWIRQPSGKGLEWLAHIWWDDDKHYNPALKSRLTISKDTSKNQVFLRIANVDTADNATYYCARIDYGDYVGFAYWGQGTLVTVSA

SEQ ID NO: 336 - protein, 118 aa, synthetic construct
  REGION 1..118: note = VH-40 Peptide Sequence
QVQLQQSGPELVRPGALVKISCKASGYTFTSYDINWVKQRPGQGLEWIGWIYPGDGSTKYNEKFKGKATLTADKSSSTAYMQLSSLTSENSAVYFCAREAASNAMDYWGQGTSVTVSS

SEQ ID NO: 337 - protein, 122 aa, synthetic construct
  REGION 1..122: note = VH-41 Peptide Sequence
EVKLEESGGGLVQPGGSMKLSCVASGFTFSNYWMNWVRQSPEKGLEWVAEIRLKSNNYATHYAESVKGRFTISRDDSKSSVYLQMNNLRAEDTGIYYCTRHYGFPYWYFDVWGAGTTVTVSS

SEQ ID NO: 338 - protein, 118 aa, synthetic construct
  REGION 1..118: note = VH-42 Peptide Sequence
QIQLVQSGPELKKPGETVKISCKASGYTFTNYGMNWVKQAPGKGLKWMGWINTNTGEPTYAEEFKGRFAFSLETSASTAYLQINNLKNEDTATYFCATGGGNWDFDYWGQGTTLTVSS

SEQ ID NO: 339 - protein, 114 aa, synthetic construct
  REGION 1..114: note = VH-43 Peptide Sequence
QIQLVQSGPELTKPGETVKISCKASGYTFTDYGMNWVRQAPGETLKWMGWINTYTGEPTYADDFKGRFAFSLESSASTAYLQINNLKNEDVATYFCARYPMDYWGQGTSVTVSS

SEQ ID NO: 340 - protein, 122 aa, synthetic construct
  REGION 1..122: note = VH-44 Peptide Sequence
EVKLEESGGGLVQPGGSMKLSCVASGFTFSNYWMNWVRQSPEKGLEWVAELRLKSNNYATHYAESVKGRFTISRDDSKSSVYLQMNNLRAEDTGIYYCTRHYGFPYWYFDVWGAGTTVTVSS

SEQ ID NO: 341 - protein, 118 aa, synthetic construct
  REGION 1..118: note = VH-45 Peptide Sequence
EVQLQQSGPELVKPGASVKMSCKASGYTFTSYVMHWVKQKPGQGLEWIGYINPYNDGTKYNEKFKGKATLTSDKSSSTAYMELSSLTSEDSAVYYCARLLFYYAMDYWGQGTSVTVSS

SEQ ID NO: 342 - protein, 118 aa, synthetic construct
  REGION 1..118: note = VH-46 Peptide Sequence
QVQLQQSGPELVRPGALVKISCKASGYTFTSYDINWVKQRPGQGLEWIGWIYPGDGSTKYNEKFKGKATLTADKSSSTVYMQLSSLTSENSAVYFCAREAASNAMDYWGQGTSVTVSS

SEQ ID NO: 343 - protein, 118 aa, synthetic construct
  REGION 1..118: note = VH-47 Peptide Sequence
QVQLQQSGPELVKPGALVKISCKASGYTFTSYDINWVKQRPGQGLEWIGWIYPGDGSTKYNEKFKGKAALTADKSSSTAYMQLSSLTSENSAVYFCAREAASNAMDYWGQGTSVTVSS

SEQ ID NO: 344 - protein, 118 aa, synthetic construct
  REGION 1..118: note = VH-48 Peptide Sequence
EVQLQQSGPELVKPGASVKMSCKASGYSFTNYIMHWVKQKPGQGLEWIGYINPYNDGTKYNEKFKGKATLTSDKSSSTAYMELSSLTSEDSAVYYCARLLFYYAMDYWGQGTSVTVSS

SEQ ID NO: 345 - protein, 118 aa, synthetic construct
  REGION 1..118: note = VH-49 Peptide Sequence
QVQLQQSGAELVKPGASVKLSCKASGYTFRSYDINWVRQRPEQGLEWIGWIFPGEGISKYNEKFKGKATLTTDKLSSTAYMQLSSLTSEDSAVYFCAREATAGAMDYWGQGTSVTVSS

SEQ ID NO: 346 - protein, 122 aa, synthetic construct
  REGION 1..122: note = VH-50 Peptide Sequence
EVKLLESGGGLVQPGGSMKLSCVASGFTFSNFWMNWVRQSPEKGLEWVAEIRLKSNNYATHYAESVKGRFTISRDDSKSSVYLQMNNLRAEDTGIYYCTRHYGFPYWYFDVWGAGTTVTVSS

SEQ ID NO: 347 - protein, 118 aa, synthetic construct
  REGION 1..118: note = VH-51 Peptide Sequence
QIQLQQSGAELVKPGASVKLSCKASGYTFTSYDICWVRQRPEQGLEWIGWIFPGDGTTKYTENFKGKATLTTDKSSSTAYMHLSRLTSEDSAVYFCAREGAGSWFAYWGQGTLVTVSA

SEQ ID NO: 348 - protein, 114 aa, synthetic construct
  REGION 1..114: note = VH-52 Peptide Sequence
EVQLQQSGAELVRPGTSVKVSCKASEYAFNNYMMEWVKQRPGQGLEWIGVINPGSGATNYNENFKDKATLTADKSSTTAYMQLSSLTSDDSAVYFCTYNDLGYWGQGTLVTVSA

SEQ ID NO: 349 - protein, 123 aa, synthetic construct
  REGION 1..123: note = VH-53 Peptide Sequence
EVKLQQSGPELMKPGTSMKISCKASGYSFTGYTMNWVKQSHGKNLEWIGLINPYNGGTNYNQKFRGKATLSVDKSSNTAYMELLSLTSEDSAVYYCARKDDYYGSSPYALDYWGQGTSVTVSS

SEQ ID NO: 350 - protein, 116 aa, synthetic construct
  REGION 1..116: note = VH-54 Peptide Sequence
QVQLQQSGAELMKPGASVKISCKATGYTFTNYWIEWVKQRPGHGLEWIGEFLPGDGSSHYNEKFKGKATFTSDTSSNTAYIHLTSLTSEDSAVYYCVRDDYDSDYWAQGTTLTVSS

SEQ ID NO: 351 - protein, 120 aa, synthetic construct
  REGION 1..120: note = VH-55 Peptide Sequence
QVQMKQSGPGLVQPSQSLSITCTVSGFSLINYGVHWVRQSPGKGLEWLGVIWSGGSTDYNAAFISRLSISKDNSKSQVFFKMNSLQADDTAIYYCARIYYYGRGYAMDYWGQGTSVTVSS

SEQ ID NO: 352 - protein, 122 aa, synthetic construct
  REGION 1..122: note = VH-56 Peptide Sequence
EVQLQQSGAEVVKPGAPVKLSCKASGYTFNNYWLNWVKQRPGRGLEWIGRIDPSDSETHYNQKFKDKATLTVDMSSSTAYIQLSSLTSEDSAVYYCARGDYYYGTRGPMDYWGQGTSVTVSS

SEQ ID NO: 353 - protein, 115 aa, synthetic construct
  REGION 1..115: note = VH-57 Peptide Sequence
QVQLQQSGAELVRPGASVNLSCKASGYTFTNYWMNWVKQRPGQGLEWVGMIDPSDSETHYNQMFKDKATLTIDKSSSIAYMQLSSLTSEDSAVYYCARWGAMDYWGQGTSVTVSS

SEQ ID NO: 354 - protein, 121 aa, synthetic construct
  REGION 1..121: note = VH-58 Peptide Sequence
QVQLKQSGPGLVAPSQSLSITCTVSGFSLTSYGVHWVRQPPGKGLEWLGIIWAGGSTNYNPALMSRLSISKDKSKSQVFLKMNSLKTDDTAMYYCARDRASLLRPGAMDYWGQGTSVTVSS

SEQ ID NO: 355 - protein, 118 aa, synthetic construct
  REGION 1..118: note = VH-59 Peptide Sequence
QIQLVQSGPELKKPGETVKISCKASGYTFTNYGMNWVKQAPGKGLKWMGWINTNTGEPTYAEEFKGRFAFSLETSASTAYLQINYLKNEDTATFFCARLDYDYDEDYWGQGTTLTVSS

SEQ ID NO: 356 - protein, 120 aa, synthetic construct
  REGION 1..120: note = VH-60 Peptide Sequence
QVQLVETGPGLVAPSQSLSITCTVSGFSLTSYGVHWIRQSPGKGLEWLGTIWAGGSTDYNSPLMSRLSISKDNSKNQVFLKMNSLQIDDTAIYYCASPPSGYDYDVFASWGQGTLVTVSA

SEQ ID NO: 357 - protein, 120 aa, synthetic construct
  REGION 1..120: note = VH-61 Peptide Sequence
QVQLKQSGPGLVQPSQSLSITCTVSGFSLINYGVHWVRQSPGKGLEWLGVIWSGGSTDYNAAFISRLSISKDNSKSQVFFKMNSLQADDTAIYYCARIYYYGRGYAMDYWGQGTSVTVSS

SEQ ID NO: 358 - protein, 120 aa, synthetic construct
  REGION 1..120: note = VH-62 Peptide Sequence
QVQLKESGPGLVAPSQSLSITCTVSGFSLTSYGVHWIRQPPGKGLEWLGGIWAGGSTDYNSPLMSRLSITKDNSKSQVFLKMNSLQSDDTAMYYCASPPSGYDYDVFAYWGQGTLVTVSA

SEQ ID NO: 359 - protein, 120 aa, synthetic construct
  REGION 1..120: note = VH-63 Peptide Sequence
QVQLKESGPVLVAPSQSLSITCTVSGFSLSSYGVHWVRQPPGKGLEWLGVIWAGGSTDYDSALMSRLSISKDNSKSQVFLKMDSLQTDDTAMYYCAKPPYDYDGAWFAYWGQGTLVTVSA

SEQ ID NO: 360 - protein, 114 aa, synthetic construct
  REGION 1..114: note = VH-64 Peptide Sequence
QVQLQQSGPQLVRPGASVKISCKASGYSFTNYWMHWVKQRPGQGLEWIGMIDPSDSETRLNQKFKDKATLTVDKSSSTAYMQLSSPTSEDSAVYYCATGRPDYWGQGTTLTVSS

SEQ ID NO: 361 - protein, 114 aa, synthetic construct
  REGION 1..114: note = VH-65 Peptide Sequence
QVQLQQSGPQLVRPGASVKISCKASGYSFTSYWMHWVKQRPGQGLEWIGMIDPSDSETRLNQKFKDKATLTVDKSSSTAYMQLSSPTSEDSIVYYCAKGRPDYWGQGTTLTVSS

SEQ ID NO: 362 - protein, 118 aa, synthetic construct
  REGION 1..118: note = VH-66 Peptide Sequence
DGKLQESGPGLVKPSQSLSLTCSVTGYSITSGYYWNWIRQFPGNKLEWMGHISYDGRNNYNPSLKNRISITRDTSKNQFFLKLNSVTTEDTATYYCAGYDFLWYFDVWGTGTTVTVSS

SEQ ID NO: 363 - protein, 121 aa, synthetic construct
  REGION 1..121: note = VH-67 Peptide Sequence
QVQLKESGPGILQPSQTLSLTCSFSGFSLSTFGMGVGWIRQPSGKGLEWLAHIWWDDDKHYNPALKSRLTISKDTSKNQVFLRIANVDTADNATYYCARIDYGDYVGFAYWGQGTLVTVSA

SEQ ID NO: 364 - protein, 118 aa, synthetic construct
  REGION 1..118: note = VH-68 Peptide Sequence
DGQLQESGPGLVKPSQSLSLTCSVTGYSITSGYYWNWIRQFPGNKLEWMGHISYDGRNNYNPSLKNRISITRDTSKNQFFLKLNSVTTEDTATYYCAGYDFLWYFDVWGTGTTVTVSS

SEQ ID NO: 365 - protein, 119 aa, synthetic construct
  REGION 1..119: note = VH-69 Peptide Sequence
EVQLQQSGAELVKSGASVKLSCTASGFNIKDYYMHWVKQRTEQGLEWIGRIYPEDDETKYAPKFQGKATITADTSSNTAYLQLSSLTSEDTAVYYCARSGGYYVWFAYWGQGTLVTVSA

SEQ ID NO: 366 - protein, 121 aa, synthetic construct
  REGION 1..121: note = VH-70 Peptide Sequence
EVQLQQSGPELVKPGSSVKISCKASRYTFTDYNMDWVKQSHGKRLEWIGYIYPNNGGTGYNQKFKGKATLTVDKSSSTAYMELRSLTSEDSAVYYCARSYYDGSYDAMDYWGQGTSVTVSS

SEQ ID NO: 367 - protein, 114 aa, synthetic construct
  REGION 1..114: note = VH-71 Peptide Sequence
QIQLVQSGPELKKPGETVKISCKASGYTFTIFGMNWVKQAPGKGLKWMGWVNTYTGEPTYADDFKGRFAFSLETSASTAYLQINNLKNEDTATYFCARGWFAYWGQGTLVTVSA

SEQ ID NO: 368 - protein, 120 aa, synthetic construct
  REGION 1..120: note = VH-72 Peptide Sequence
QVQLKESGPVLVAPSQSLSITCTVSGFSLTSYGIHWVRQPPGKGLEWLGVIWAGGSTNYNSALMSRLSISKDNSKSQVFLKMNSLQIDDTAMYYCAKPPHDYDQAWFAYWGQGTLITVSA

SEQ ID NO: 369 - protein, 116 aa, synthetic construct
  REGION 1..116: note = VH-73 Peptide Sequence
QVQLQQSGAELVRPGASVKLSCKASGYTFTSSWMNWVKQRPGQGLDWIGMIDPSDSETHYNQMFKDKATLTVDKSSNTAYMQLSRLTSEDSAVYYCVNSNYESGYWGQGTTLTVSS

SEQ ID NO: 370 - protein, 116 aa, synthetic construct
  REGION 1..116: note = VH-74 Peptide Sequence
QVQLQQSGAELVRPGASVKLSCKASGYTFTGYWLNWVKQRPGQGLEWIGMIDPSDSETHYNQVFKDKATMTVDRSSSTAYMQLSGLTSEDSAVYYCANSNYASGSWGQGTTLTVSS

SEQ ID NO: 371 - protein, 120 aa, synthetic construct
  REGION 1..120: note = VH-75 Peptide Sequence
EVQLQQSGPELVKPGASVKVSCKASGYSFTDYNMYWVMQSHGKSLEWIGYIDPYNDATSYSQKFTGKATLTVDKSSSTAFMHLNSLTSEDSAVYYCARWGRYEYYAMDYWGQGTSVTVSS

SEQ ID NO: 372 - protein, 115 aa, synthetic construct
  REGION 1..115: note = VH-76 Peptide Sequence
QVQLKESGPDLVQPSQTLSLTCTVSGFSLTIYGVHWVRQPPGKGLEWVGTVAWDDKKYYNSPLQSRLSISRDTSKNQVFLKLSSLQTEDTAMYYCTMTGGPINYWGPGTSVTVSS

SEQ ID NO: 373 - protein, 117 aa, synthetic construct
  REGION 1..117: note = VH-77 Peptide Sequence
EVQLVESGGGLVKPGGSLKLSCAASGFTFSSYAMSWVRQTPEKRLEWVASISSGDSPYYPDSVKGRFTISRDNARNILYLQMSSLRSEDTAMYYCTRFTTVVEMDYWGQGTSVTVSS

SEQ ID NO: 374 - protein, 112 aa, synthetic construct
  REGION 1..112: note = VL-1 Peptide Sequence
DIVLTQSPLSLPVTPGEPASISCRSSKSLLYKDGKTYLNWFLQKPGQSPQLLIYLMSTHASGVPDRFSGSGSGTDFTLKISRVEAEDVGVYYCQQLVDYPLTFGGGTKLEIK

SEQ ID NO: 375 - protein, 112 aa, synthetic construct
  REGION 1..112: note = VL-2 Peptide Sequence
DIVMTQTPLSLSVTPGQPASISCKSSKSLLHSDGITYLYWYLQKPGQSPQLLIYRMSNLASGVPDRFSGSGSGTDFTLKISRVEAEDVGVYYCAQMLEFPLTFGQGTKLEIK

SEQ ID NO: 376 - protein, 107 aa, synthetic construct
  REGION 1..107: note = VL-3 Peptide Sequence
DILMTQSPSSMSVSLGDTVSITCHASQGINSNMGWLQQKPGKSFKGLIYHATNLEDGVPSRFSGSGSGADYSLTISSLESEDFADYYCVQYAQFPPTFGSGTKLEIK

SEQ ID NO: 377 - protein, 112 aa, synthetic construct
  REGION 1..112: note = VL-4 Peptide Sequence
DVVMTQTPLTLSVAIGQPASISCKSSQSLLYTNGKTYLNWLLQRPGQSPKRLIYLLSKLDSGVPDRFSASGSGTDFTLKISRVEAEDLGVYYCLQSTHFPLTFGAGTKLEMK

SEQ ID NO: 378 - protein, 112 aa, synthetic construct
  REGION 1..112: note = VL-5 Peptide Sequence
DVVMTQTPLTLSVTIGQPASISCKSSQSLFDSDGKTYLNWLLQRPGQSPKRLIYLVSKLDSGVPDRFTGSGSGTDFTLKISRVEAEDLGVYYCWQGTHFPLTFGAGTKLEMK

SEQ ID NO: 379 - protein, 112 aa, synthetic construct
  REGION 1..112: note = VL-6 Peptide Sequence
DVLMTQTPLSLPVSLGDQASISCRSSQSIVHNNGNTYLEWYLQKPGQSPKLLIYKVSNRFSGVPDRFSGSGSGTDFTLKISRVEAEDLGVYYCFQGSHVPLTFGGGTKLELK

SEQ ID NO: 380 - protein, 107 aa, synthetic construct
  REGION 1..107: note = VL-7 Peptide Sequence
DIQMTQTTSSLSASLGDRVTISCSASQGINNYLNWYQQKPDGTVKLLIYYASSLHSGVPSRFSGSGSGTDYSLTISNLEPEDIATYYCQQYSQVPYTFGSGTKLEIK

SEQ ID NO: 381 - protein, 107 aa, synthetic construct
  REGION 1..107: note = VL-8 Peptide Sequence
DIQMNQSPSSLSASLGDTITITCRASQNIYIWLSWYQQKPGNIPKLLIYKASNLHTGVPSRFSGSGSGTDFTLTISTLQPEDIATYFCLQGQSYPLTFGAGTKLEMK

SEQ ID NO: 382 - protein, 107 aa, synthetic construct
  REGION 1..107: note = VL-9 Peptide Sequence
DIQMTQTTSSLSASLGDRVTINCSASQDISNYLNWYQQKPDGTVKLLIYYTSSLLSGVPSRFSGSGSGTDYSLTISNLEPEDIATYFCQQYSKLPYTFGSGTHLEIK

SEQ ID NO: 383 - protein, 112 aa, synthetic construct
  REGION 1..112: note = VL-10 Peptide Sequence
DIVMTQAAFSNPVTLGTSASISCRSSKSLLHSDGITYLYWYLQRPGQSPQLLIYRMSNLASGVPDRFSGSGSGTDFTLRISRVEAEDVGVYYCAQMIEFPLTFGAGTILELK

SEQ ID NO: 384 - protein, 112 aa, synthetic construct
  REGION 1..112: note = VL-11 Peptide Sequence
DVVMTQTPLTLSVAIGQPASISCKSSQSLLYTNGKTYLNWLLQRPGQSPKRLIYLVSKLDSGVPDRFSGSGSGTDFTLKISRVEAEDLGVYYCLQSTHFPLTFGAGTKLELK

SEQ ID NO: 385 - protein, 112 aa, synthetic construct
  REGION 1..112: note = VL-12 Peptide Sequence
DVLMTQTPLSLPVSLGDQASISCRSSQSIVHSNGNTYLEWYLQKPGQSPKLLIYKVSNRFSGVPDRFSGSGSGTDFTLKISRVEAEDLGVYYCFQGSHVPLTFGAGTKLELK

SEQ ID NO: 386 - protein, 112 aa, synthetic construct
  REGION 1..112: note = VL-13 Peptide Sequence
DIVITQDELSNPVTSGESVSISCRSSKSLLYKDGKTYLNWFLQRPGQSPQLLIYLMSTHASGVSDRFSGSGSGTDFTLEISRVKAEDVGVYYCQQLVDYPLTFGAGTKLELK

SEQ ID NO: 387 - protein, 112 aa, synthetic construct
  REGION 1..112: note = VL-14 Peptide Sequence
DIVMTQAAFSNPVTLGTSASISCRSSKSLLHSDGITYLYWYLQRPGQSPQLLIYRMSNLASGVPDRFSGSGSGTDFTLRISRVEAEDVGVYYCAQMLEFPLTFGAGTKLELK

SEQ ID NO: 388 - protein, 112 aa, synthetic construct
  REGION 1..112: note = VL-15 Peptide Sequence
DIVMTQSPLSLPVTPGEPASISCRSSKSLLHSDGITYLYWYLQKPGQSPQLLIYRMSNLASGVPDRFSGSGSGTDFTLKISRVEAEDVGVYYCAQMLEFPLTFGQGTKLEIK

SEQ ID NO: 389 - protein, 113 aa, synthetic construct
  REGION 1..113: note = VL-16 Peptide Sequence
DVVMTQTPLTLSVTIGQPASISCKSSQSLLYTDGKTYLSWFLQRPGQSPKRLIYLVSKLDSGVPDRFSGSGSGTDFTLKISRVEAEDLGVYYCLQSTHFPLTFGAGTKLEVKR

SEQ ID NO: 390 - protein, 108 aa, synthetic construct
  REGION 1..108: note = VL-17 Peptide Sequence
SIVMTQTPKFLLVSAGDRVTITCKASQSVSNDVAWYQQKPGQSPKLLIYYASNRYTGVPDRFTGSGYGTDFTFTISTVQAEDLAVYFCQQDYTSPYTFGGGTKLEIKR

SEQ ID NO: 391 - protein, 108 aa, synthetic construct
  REGION 1..108: note = VL-18 Peptide Sequence
DIQMTQTTSSLSASLGDRVTISCSASQGISNYLNWYQQKPDGTVKLLIYYTSSLHSGVPSRFSGSGSGTDYSLTISNLEPEDIATYYCQQYSELPYTFGSGTKLEIKR

SEQ ID NO: 392 - protein, 108 aa, synthetic construct
  REGION 1..108: note = VL-19 Peptide Sequence
DIVMTQSHKFMSTSVGDRVSITCKASQDVSTAVAWYQQKPGQSPKLLIYWASTRHTGVPDRFTGSGSGTDYTLTISSVQAEDLALYYCQQHYTTPLTFGAGTKLELKR

SEQ ID NO: 393 - protein, 108 aa, synthetic construct
  REGION 1..108: note = VL-20 Peptide Sequence
DIVMTQSQKFMSTSVGERVSITCKASQNVGTNVAWYQQKAGQSLELLIYGASNRHTGVPDRFTGSGSGTDFTLTITNVQSEDMTNYFCEQYSNFPLTFGAGTKLELKR

SEQ ID NO: 394 - protein, 113 aa, synthetic construct
  REGION 1..113: note = VL-21 Peptide Sequence
DVVMTQTPLTLSVTIGQPASISCKSSQSLFHSDGKTYLNWLLQRPGQSPKRLIYLVSKLDSGVPDRFTGSGSGTDFTPKISRVEDEDLGVYYCWQGTHFPLTFGAGTKLEMKR

SEQ ID NO: 395 - protein, 108 aa, synthetic construct
  REGION 1..108: note = VL-22 Peptide Sequence
DIQMNQSPSSLSASLGDTISITCRASQNINIWLSWYQQKPGNIPQLLIYKASNLHTGVPSRFSGSGSGTDFTLTISSLQPEDIATYYCLQGQSYPLTFGAGTKLVMKR

SEQ ID NO: 396 - protein, 111 aa, synthetic construct
  REGION 1..111: note = VL-23 Peptide Sequence
DVVMTQTPLTLSVTIGQPASISCKSSQSLLHSDGKTYLNWLLQRPGQPPKRLMYLVSTLDSGVPDRFTGSGSGTDFTLKISRVEAEDLGVYYCWQGTHFPLTFGAGTKPER

SEQ ID NO: 397 - protein, 111 aa, synthetic construct
  REGION 1..111: note = VL-24 Peptide Sequence
DIVMTQAAFSNPVTLGTSASISCRSSKSLLHSDGITYFYWYLQRPGQSPQLLIYRMSNLASGVPDRFSGSGSGTDFTLRISRVEAEDVGVYYCAQMLEFPLTFGAGTKLER

SEQ ID NO: 398 - protein, 108 aa, synthetic construct
  REGION 1..108: note = VL-25 Peptide Sequence
DIVMTQSHKFMSTSVGDRVSITCKASQDVRTAVAWYQQKPGQSPKLLIYWASTRHTGVPDRFTGSGSGTDFTLTLSNVQSEDLADYFCQQYSSYPWTFGGGTKLEIKR

SEQ ID NO: 399 - protein, 112 aa, synthetic construct
  REGION 1..112: note = VL-26 Peptide Sequence
NIWLTQSPSSLAVSAGEMVTMTCKSSQSVLYSSNQKNYLAWYQQKPGQSPKLLIYWASTRESGVPDRFTGSGSGTDFSLTISSVQAEDLAVYYCHQYLSSLTFGAGTKLELK

SEQ ID NO: 400 - protein, 112 aa, synthetic construct
  REGION 1..112: note = VL-27 Peptide Sequence
NIMMTQSPSSLAVSAGEKVTMSCKSSQSVLYSSNQKNYLAWYQQKPGQSPKLLIYWASTRESGVPDRFTGSGSGTDFTLTISSVQPEDLAVYYCHQYLSSLTFGAGTKLELK

SEQ ID NO: 401 - protein, 112 aa, synthetic construct
  REGION 1..112: note = VL-28 Peptide Sequence
NIMMTQSPSSLAVSAGQKVTMSCKSSQSVLYSSSQKNYLAWYQQKPGQSPKLLIYWASTRESGVPDRFSGSGSGTDFTLTISSVQPEDLAVYYCHQYLSSLTFGAGTKLELK

SEQ ID NO: 402 - protein, 112 aa, synthetic construct
  REGION 1..112: note = VL-29 Peptide Sequence
DVVMTQTPLSLPVSLGDQASISCRSSQSLVHNSGNTYLHWYLQRPGQSPNLLIYKVSNRFSGVPDRFSGSGSGTDFTLKISRVAAEDLGVYFCSQSTHVPPTFGGGTKLEIK

SEQ ID NO: 403 - protein, 109 aa, synthetic construct
  REGION 1..109: note = VL-30 Peptide Sequence
QAVVTQESALTTSPGETVTLTCRSSTGAVTTSNYANWVQEKPDHLFTGLIGGINNRVPGVPARFSGSLIGDKAALTITGAQTEDEAIYFCALWYSNHWVFGGGTKLTVL

SEQ ID NO: 404 - protein, 112 aa, synthetic construct
  REGION 1..112: note = VL-31 Peptide Sequence
DIVMTQAAFSNPVTLGTSASISCRSSKSLLHTNGITFLYWYLQKPGQSPQPLIYQMSNLASGVPDRFSSSGSGTDFTLRISRVEAEDVGVYYCAQNLELPWTFGGGTKLEIN

SEQ ID NO: 405 - protein, 112 aa, synthetic construct
  REGION 1..112: note = VL-32 Peptide Sequence
NIMMTQSPSSLAVSAGEKVTMSCKSSQSVLYSSNQKNYLAWYQQKPGQSPKLLIYWASTRESGVPDRFTGSGSGTDFTLTISSVQAEDLAVYYCHQYLSSLTFGAGTKLELK

SEQ ID NO: 406 - protein, 113 aa, synthetic construct
  REGION 1..113: note = VL-33 Peptide Sequence
DIVMTQSPSSLAMSVGQKVTMSCKSSQSLLNSSNQKNYLAWYQQKPGQSPKLLVYFASTRESGVPDRFIGSGSGTDFTLTISSVQAEDLADYFCQQHYSTPYTFGGGAKLEIK

SEQ ID NO: 407 - protein, 107 aa, synthetic construct
  REGION 1..107: note = VL-34 Peptide Sequence
DIRMTQSPSSLSASLGDTITITCHASQNINVWLSWYQQKPGNIPKLLIYKASNLHTGVPSRFSGSGSGTGFTLTISSLQPEDIATYYCQQGQSYPYTFGGGTKLELK

SEQ ID NO: 408 - protein, 107 aa, synthetic construct
  REGION 1..107: note = VL-35 Peptide Sequence
EIVLTQSPASLSVTTGEKVTIRCITSIDIDDDMNWYQQKPGEPPKLLISEGNTLRPGVPSRFSSSGYGTDFVFTIENTLSEDVADYYCLQSDNKPLTFGAGTKLELK

SEQ ID NO: 409 - protein, 107 aa, synthetic construct
  REGION 1..107: note = VL-36 Peptide Sequence
DIQVIQSPSSLSASLGDTITITCHASQNINVWLSWYQQKPGNIPKLLIYKASNLHTGVPSRFSGSGSGTGFTLTISSLQPEDIATYYCQQGQSYPYTFGGGTKLELK

SEQ ID NO: 410 - protein, 107 aa, synthetic construct
  REGION 1..107: note = VL-37 Peptide Sequence
EIKMNQSPSSLSASLGDTITITCHASQNINVWLSWYQQKPGNIPKLLIYKASNLHTGVPSRFSGSGSGTGFTLTISSLQPEDIATYYCQQGQSYPYTFGGGTKLELK

SEQ ID NO: 411 - protein, 109 aa, synthetic construct
  REGION 1..109: note = VL-38 Peptide Sequence
QAVVTQESALTTSPGETVTLTCRSSTGAVTTSNYANWVQEKPDHLFTGLIGGTNNRAPGVPARFSGSLIGDKAALTITGAQTEDEAIYFCALWYSNHLVFGGGTKLTVL

SEQ ID NO: 412 - protein, 112 aa, synthetic construct
  REGION 1..112: note = VL-39 Peptide Sequence
DVLMTQTPLSLPVSLGDQASISCRSSQDIVHSSGNTYLEWYLQKPGQSLKLLIYKVSNRFSGVPDRFSASGSGTDFTLKISRVEAEDLGVYYCFQGSHVPPTFGSGTKLEIK

SEQ ID NO: 413 - protein, 112 aa, synthetic construct
  REGION 1..112: note = VL-40 Peptide Sequence
DIGMRQAAFSNPVTLGTSASISCRSSKSLLYSNGITYLYWFLQKPGQSPQLLIYQMSNLASGVPDRFSSSGSGTDFTLRISRVEADDVGVYYCAQNLELPWTFGGGTKLEIK

SEQ ID NO: 414 - protein, 111 aa, synthetic construct
  REGION 1..111: note = VL-41 Peptide Sequence
DIVLTQSPASLGVSLGQRATISCRASKSVSTSGYSYMHWYQQKPGQPPKLLIYLASILESGVPARFSGSGSGTDFTLNIHPVEEEDAAIYYCQHSRELPLTFGAGTKLELK

SEQ ID NO: 415 - protein, 111 aa, synthetic construct
  REGION 1..111: note = VL-42 Peptide Sequence
NIVLTQSPASLAVSLGQRATISCRASESVDSYGNSFMHWYQQKPGQPPKLLIYLASNLESGVPARFSGSGSRTDFTLTIDPVEADDAATYYCQQNNEDPWTFGGGTKLEIK

SEQ ID NO: 416 - protein, 112 aa, synthetic construct
  REGION 1..112: note = VL-43 Peptide Sequence
DVVMTQTPLTLSVTIGQPASISCKSSQSLLYSNGKTYLNWLLQRPGQSPKRLIYLVSKLDSGVPDRFTGSGSGTDFTLKISRVEAEDLGVYYCVQGTHFPQTFGGGTKLEIK

SEQ ID NO: 417 - protein, 107 aa, synthetic construct
  REGION 1..107: note = VL-44 Peptide Sequence
DILMTQSPSSMSVSLGDTVSITCHASQGINSNIGWLQQKPGKSFKGLIYHGTNLEDGVPSRFSGSGSGADYSLTISSLESEDFADYYCVQYDQFPWTFGGGTKLEIK

SEQ ID NO: 418 - protein, 111 aa, synthetic construct
  REGION 1..111: note = VL-45 Peptide Sequence
DIVMSQSPASLGVSLGQRATISCRASKSVSTSGYSYMHWYQQKPGQPPKLLIYLASILESGVPARFSGSGSGTDFTLNIHPVEEEDAAIYYCQHSRELPLTFGAGTKLELK

SEQ ID NO: 419 - protein, 111 aa, synthetic construct
  REGION 1..111: note = VL-46 Peptide Sequence
DIVLTQSPASLAVSLGQRATISCRASKSVSTSGYSYMHWYQQKPGQPPKLLIYLASILESGVPARFSGSGSGTDFTLNIHPVEEEDAATYYCQHSRELPLTFGAGTKLELK

SEQ ID NO: 420 - protein, 107 aa, synthetic construct
  REGION 1..107: note = VL-47 Peptide Sequence
DILMTQTPSSMSVSLGDTVSITCHASQGISSNIGWLQQKPRKSFKGLIYYGTNLEDGVPSRFSGSGSGADYSLTISSLESEDFADYYCVQYDQFPWTFGGGTKLEIK

SEQ ID NO: 421 - protein, 111 aa, synthetic construct
  REGION 1..111: note = VL-48 Peptide Sequence
DIVLTQSPASLAVSLGQRATISCRASKSVSTSGYSCMHWYQQKPGQPPKLLIYLASNLESGVPARFSGGGSGTDFTLSIHPVEEEDAATYYCHHSTELPYTFGGGTKLEVE

SEQ ID NO: 422 - protein, 111 aa, synthetic construct
  REGION 1..111: note = VL-49 Peptide Sequence
DIVLTQSPASLAVSLGQRATISCRASESVDSYGNSFMHWYQQKPGQPPKLLIYLASNLESGVPARFSGSGSRTDFTLTIDPVEADDAATYYCQQNNEDPWTFGGGTKLEIK

SEQ ID NO: 423 - protein, 111 aa, synthetic construct
  REGION 1..111: note = VL-50 Peptide Sequence
DVVMTQTPLTLSVTIGQPASISCKSSQSLLYSDGKTYLNWLLQRPGQSPKRLIYLVSQLDSGVPDRFTGSGSGTDFTLKISRVEADDLGVYCCVQGTHLPTFGGGTKLEIK

SEQ ID NO: 424 - protein, 111 aa, synthetic construct
  REGION 1..111: note = VL-51 Peptide Sequence
DIVMTQSPASLAVSLGQRATISCRASESVENHVNSFMHWFQQKPGQPPKLLIYRASNLQSGIPARFSGSGSRTDFTLTINPVEADDVATYYCQQNNEVPYTFGGGTKLEIK

SEQ ID NO: 425 - protein, 106 aa, synthetic construct
  REGION 1..106: note = VL-52 Peptide Sequence
QIVLSQSPAILSASPGEKVTMTCRASSSVTYMYWYQQKPGSSPQPWIYATSNLASGVPARFSGSGSGTSYSLTISRVEAEDAATYYCQQWSSNPLTFGAGTKLELK

SEQ ID NO: 426 - protein, 111 aa, synthetic construct
  REGION 1..111: note = VL-53 Peptide Sequence
DIVLTQSPASLAVSLGQRATISCRASESLDNSGISFMNWFQQRPGQPPKLLIYAASNLESGVPARFSGSGSGTDFSLNIHPMEEDDAAMYFCQHSKEVPWTFGGGTKLEIK

SEQ ID NO: 427 - protein, 107 aa, synthetic construct
  REGION 1..107: note = VL-54 Peptide Sequence
DIVMTQSHKIMSTSVGDRVSITCKASQDVSTTVAWFQQKPGQSPKLLLYWASTRHTGVPDRFTGSGSGTDYTLTISSVQAEDLALYYCQQHYSPPFTFGSGTKLEIK

SEQ ID NO: 428 - protein, 107 aa, synthetic construct
  REGION 1..107: note = VL-55 Peptide Sequence
DIVMTQSQKFMSTSVGDRVSVTCKASQNVGINVAWYQQKPGQSPKALIYSASYRYSGVPDRFTGSGSGTDFTLTISNVQSEDLAEYFCQQYNSYPYTFGGGTKLEMK

SEQ ID NO: 429 - protein, 112 aa, synthetic construct
  REGION 1..112: note = VL-56 Peptide Sequence
DVVMTQTPLTLSVTLGQPASISCRSSQSLLDSDGKTYLNWLLQRPGQSPKRLIYLVSRLDSGVPDRFTGSGSGTDFTLKISRVEAEDLGVYYCWQGTHFPFTFGGGTKLEIK

SEQ ID NO: 430 - protein, 107 aa, synthetic construct
  REGION 1..107: note = VL-57 Peptide Sequence
DIRMTQSPASLSASVGETVTITCRASGNIHNYLAWYHQKQGKSPQLLVYNVKTLADGVPSRFSGSGSGTQFSLKINSLQPEDFGTYYCQHFWSIFPTFGGGTKLEIK

SEQ ID NO: 431 - protein, 106 aa, synthetic construct
  REGION 1..106: note = VL-58 Peptide Sequence
QILLSQSPAILSASPGEKVTMTCRASSSVTYMYWYQQKPGSSPQPWIYATSNLASGVPARFSGSGSGTSYSLTISRVEAEDAATYYCQQWSSNPLTFGAGTKLELK

SEQ ID NO: 432 - protein, 107 aa, synthetic construct
  REGION 1..107: note = VL-59 Peptide Sequence
DILMTQSPASLSASVGETVTITCRASGNIHNYLAWYQQKQGKSPQLLVYSAKTLADGVPSRFSGSGSGTQFSLKIDSLQPEDFGTYYCQHFWSLFPTFGGGTKLEIK

SEQ ID NO: 433 - protein, 107 aa, synthetic construct
  REGION 1..107: note = VL-60 Peptide Sequence
DVVMTQTPKFLLVSAGDRVTITCKASQSVSSDVAWYQQKPGQSPKLLIYFASNRYTGVPDRFTGSGYGTDFTFTISTVQAEDLAVYFCQHNYISPFTFGGGTKLEIK

SEQ ID NO: 434 - protein, 107 aa, synthetic construct
  REGION 1..107: note = VL-61 Peptide Sequence
DIVMTQSHKFMSTSVGDRVSITCKASQDVSTAVAWYQQKPGQSPKLLIYWASTRHTGVPDRFTGSGSGTDYTLTISSVQAEDLALYYCQQHYSTPYTFGGGTKLEIK

SEQ ID NO: 435 - protein, 107 aa, synthetic construct
  REGION 1..107: note = VL-62 Peptide Sequence
DIAMTQSHKFMSTSVGDRVSITCKASQDVSTAVAWYQQKPGQSPKLLIYWASTRHTGVPDRFTGSGSGTDYTLTISSVQAEDLALYYCQQHYNTPYTFGGGTKLEIK

SEQ ID NO: 436 - protein, 112 aa, synthetic construct
  REGION 1..112: note = VL-63 Peptide Sequence
DVGMTQTPLILSVTIGQPASISCKSSQSLLYINGKTYLNWLLQRPGQSPKRLIYLVSKLDSGVPNRFSGSGSGTDFTLKISRVEAEDLGVYYCLQSTHFPQTFGGGTKLEIK

SEQ ID NO: 437 - protein, 107 aa, synthetic construct
  REGION 1..107: note = VL-64 Peptide Sequence
DILLTQSPSSMSVSLGDTVSITCHASQGINSNIGWLQQKPGKSFKGLIYHGTNLEDGVPSRFSGSGSGADYSLTISSLESEDFADYYCVQYDQFPWTFGGGTKLEIK

SEQ ID NO: 438 - protein, 112 aa, synthetic construct
  REGION 1..112: note = VL-65 Peptide Sequence
DIVMTQAAPSVPVTPGESVSISCRSSRSLLHSNGYTYLYWFLQRPGQSPRLLIYRMSNLASGVPDRFSGSGSGTAFTLRISRVEAEDVGVYYCMQHLEYPYTFGGGTKLEIK

SEQ ID NO: 439 - protein, 107 aa, synthetic construct
  REGION 1..107: note = VL-66 Peptide Sequence
DIQMTQTTSSLSASLGDRVTISCSASQGISNYLNWYQQKPDGTVKLLIYYTSSLHSGVPSRFSGSGSGTDYSLTISNLEPEDIATYYCQQYSKLPRTFGGGTKLEIN

SEQ ID NO: 440 - protein, 112 aa, synthetic construct
  REGION 1..112: note = VL-67 Peptide Sequence
DVVMTQTPLTLSVTIGQPASISCKSSRSLLDSDGKTYLNWLLQRPGQSPKRLIYLVSKLDSGVPDRFTGSGSGTDFTLKISRVEAEDLGVYYCWQGTHFPQTFGGGTKLEIN

SEQ ID NO: 441 - protein, 107 aa, synthetic construct
  REGION 1..107: note = VL-68 Peptide Sequence
DIQMNQSPSSLSASLGDTITITCHASQNINVWLSWYQQKPGNIPKLLIYQASNLHTGVPSRFSGRGSGTGFTLTISSLQPEDIATYYCQQGQSSPFTFGSGTKLEIK

SEQ ID NO: 442 - protein, 107 aa, synthetic construct
  REGION 1..107: note = VL-69 Peptide Sequence
DILMTQSHKFMSTSVGDRVSITCKASQDVSSVVVWYQQKPGQSPKQLIYWASTRHTGVPDRFTGSGSGTDYTLTISSVQAEDLALYYCQQHYSTPYTFGGGTKLEIK

SEQ ID NO: 443 - protein, 109 aa, synthetic construct
  REGION 1..109: note = VL-70 Peptide Sequence
QAVVTQESALTTSPGETVTLTCRSSTGAVTTSNYANWDQEKPDHLFTGLIGGTNNRAPGVPARFSGSLIGDKAALTITGAQTEDEAIYFCALWYSNHLVFGGGTKVTVL

SEQ ID NO: 444 - protein, 111 aa, synthetic construct
  REGION 1..111: note = VL-71 Peptide Sequence
DIVMTQSPASLPVSLGQRATISCRASKSVTTSAYSYIHWYQQRPGQPPKLLIYLASNLESGVPARFSGSGSGTDFTLNIHPVEEEDAATYYCQHNRELPPTFGGGTKLEIN

SEQ ID NO: 445 - protein, 107 aa, synthetic construct
  REGION 1..107: note = VL-72 Peptide Sequence
DIVLTQSPATLSVTPGDSVSFSCRASQIINNNLHWYQQKSHESPRLLIRYTSQSISGIPSRFSGSGSGTDFTLSINNVETEDFGMYFCQQTNSWPLTFGAGTKLELK

SEQ ID NO: 446 - protein, 111 aa, synthetic construct
  REGION 1..111: note = VL-73 Peptide Sequence
DVVMTQTPLTLSVTIEQTASISCKSSQSLLDRDGKTYLNWLLQRPGQSPKRLIYLVSKLDSGVPDRFTGSGSGTDFTLKISRVEAEDLGVYYCWQGTHFPTFGGGTKLEIK

SEQ ID NO: 447 - protein, 107 aa, synthetic construct
  REGION 1..107: note = VL-74 Peptide Sequence
DVVMTQTPKFLPITAEDRVTITCKASQSVSNEVAWYQQKPGQSPKLLIYYASNRYTGVPDRFTGSGSGTDFTFTIRSVQLEDLAVYFCQQHYSSPWTFGGGTKLEIK

SEQ ID NO: 448 - protein, 442 aa, synthetic construct
  REGION 1..442: note = TB001 heavy chain peptide sequence
QVQLVQSGSELKKPGASVKVSCKASGYTFTNYGMNWVRQAPGQGLKWMGWINTNTGEPTYVEEFTGRFVFSLETSVSTAYLQISSLKAEDTAVYFCAPYDNFFAYWGQGTTVTVSSASTKGPSVFPLAPCSRSTSESTAALGCLVKDYFPEPVTVSWNSGALTSGVHTFPAVLQSSGLYSLSSVVTVPSSSLGTKTYTCNVDHKPSNTKVDKRVESKYGPPCPPCPAPEFLGGPSVFLFPPKPKDTLMISRTPEVTCVVVDVSQEDPEVQFNWYVDGVEVHNAKTKPREEQFNSTYRVVSVLTVLHQDWLNGKEYKCKVSNKGLPSSIEKTISKAKGQPREPQVYTLPPSQEEMTKNQVSLTCLVKGFYPSDIAVEWESNGQPENNYKTTPPVLDSDGSFFLYSRLTVDKSRWQEGNVFSCSVMHEALHNHYTQKSLSLSLG

SEQ ID NO: 449 - protein, 442 aa, synthetic construct
  REGION 1..442: note = TB006 heavy chain peptide sequence
QVQLVQSGAEVKKPGASVKVSCKASGYSFTNYYMHWVRQAPGQRLEWMGWIYPGSGNTNYNEKFQGRVTITADTSASTAYMELSSLRSEDTAVYYCSTAPGGFDVWGQGTTVTVSSASTKGPSVFPLAPCSRSTSESTAALGCLVKDYFPEPVTVSWNSGALTSGVHTFPAVLQSSGLYSLSSVVTVPSSSLGTKTYTCNVDHKPSNTKVDKRVESKYGPPCPPCPAPEFLGGPSVFLFPPKPKDTLMISRTPEVTCVVVDVSQEDPEVQFNWYVDGVEVHNAKTKPREEQFNSTYRVVSVLTVLHQDWLNGKEYKCKVSNKGLPSSIEKTISKAKGQPREPQVYTLPPSQEEMTKNQVSLTCLVKGFYPSDIAVEWESNGQPENNYKTTPPVLDSDGSFFLYSRLTVDKSRWQEGNVFSCSVMHEALHNHYTQKSLSLSLG

SEQ ID NO: 450 - protein, 452 aa, synthetic construct
  REGION 1..452: note = 12G5.D7 heavy chain peptide sequence
QVQLKQSGAELVRPGASVKLSCKASGYTFTDYYINWVKQRPGQGLEWIARIYPGTGNTDYNEKFKGRATLTAEKSSSTAYMQLSSLTSEDSAVYFCARFAYYYGSGGYFDYWGHGTTLTVSSAKTTPPSVYPLAPVCGDTTGSSVTLGCLVKGYFPEPVTLTWNSGSLSSGVHTFPAVLQSDLYTLSSSVTVTSSTWPSQSITCNVAHPASSTKVDKKIEPRGPTIKPCPPCKCPAPNAAGGPSVFIFPPKIKDVLMISLSPIVTCVVVDVSEDDPDVQISWFVNNVEVHTAQTQTHREDYNSTLRVVSALPIQHQDWMSGKEFKCKVNNKDLGAPIERTISKPKGSVRAPQVYVLPPPEEEMTKKQVTLTCMVTDFMPEDIYVEWTNNGKTELNYKNTEPVLDSDGSYFMYSKLRVEKKNWVERNSYSCSVVHEGLHNHHTTKSFSRTPGK

SEQ ID NO: 451 - protein, 449 aa, synthetic construct
  REGION 1..449: note = 13A12.2E5 heavy chain peptide sequence
QIQLVQSGPELKKPGETVKISCKTSGYKFKTYVMSWVKQAPGKALKWMGWINTYSGVPTYADDFKGRFAFSLETSASTAYLEIINLKNEDTATYFCARDGNYGDPMDYWGQGTSVTVSSAKTTPPSVYPLAPVCGDTTGSSVTLGCLVKGYFPEPVTLTWNSGSLSSGVHTFPAVLQSDLYTLSSSVTVTSSTWPSQSITCNVAHPASSTKVDKKIEPRGPTIKPCPPCKCPAPNAAGGPSVFIFPPKIKDVLMISLSPIVTCVVVDVSEDDPDVQISWFVNNVEVHTAQTQTHREDYNSTLRVVSALPIQHQDWMSGKEFKCKVNNKDLGAPIERTISKPKGSVRAPQVYVLPPPEEEMTKKQVTLTCMVTDFMPEDIYVEWTNNGKTELNYKNTEPVLDSDGSYFMYSKLRVEKKNWVERNSYSCSVVHEGLHNHHTTKSFSRTPGK

SEQ ID NO: 452 - protein, 447 aa, synthetic construct
  REGION 1..447: note = 14H10.2C9 heavy chain peptide sequence
QIQLVQSGPELKKPGETVKISCKASGYTFTTYGMGWVKQAPGKDLKWMGWINTYSGVPTYADDFKGRFAFSLETSASTAYLQISNLKNEDTATYFCSTPYEYDGAYWGQGTLVTVSAAKTTPPSVYPLAPVCGDTTGSSVTLGCLVKGYFPEPVTLTWNSGSLSSGVHTFPAVLQSDLYTLSSSVTVTSSTWPSQSITCNVAHPASSTKVDKKIEPRGPTIKPCPPCKCPAPNAAGGPSVFIFPPKIKDVLMISLSPIVTCVVVDVSEDDPDVQISWFVNNVEVHTAQTQTHREDYNSTLRVVSALPIQHQDWMSGKEFKCKVNNKDLGAPIERTISKPKGSVRAPQVYVLPPPEEEMTKKQVTLTCMVTDFMPEDIYVEWTNNGKTELNYKNTEPVLDSDGSYFMYSKLRVEKKNWVERNSYSCSVVHEGLHNHHTTKSFSRTPGK

SEQ ID NO: 453 - protein, 443 aa, synthetic construct
  REGION 1..443: note = 15F10.2D6 heavy chain peptide sequence
EVQLVESGGGLVKPGGSLKLSCAASGFAFSSYAMSWVRQTPEKRLEWVATISDGGVYTYYTDHVKGRFTISRDNAEDNLYLQMSHLKSEDTAMYYCVRDGGYWGQGTTLTVSSAKTTPPSVYPLAPVCGDTTGSSVTLGCLVKGYFPEPVTLTWNSGSLSSGVHTFPAVLQSDLYTLSSSVTVTSSTWPSQSITCNVAHPASSTKVDKKIEPRGPTIKPCPPCKCPAPNAAGGPSVFIFPPKIKDVLMISLSPIVTCVVVDVSEDDPDVQISWFVNNVEVHTAQTQTHREDYNSTLRVVSALPIQHQDWMSGKEFKCKVNNKDLGAPIERTISKPKGSVRAPQVYVLPPPEEEMTKKQVTLTCMVTDFMPEDIYVEWTNNGKTELNYKNTEPVLDSDGSYFMYSKLRVEKKNWVERNSYSCSVVHEGLHNHHTTKSFSRTPGK

SEQ ID NO: 454 - protein, 446 aa, synthetic construct
  REGION 1..446: note = 19B5.2E6 heavy chain peptide sequence
QIQLVQSGPELKKPGETVKISCKASGYTFTTYAMSWVKQAPGKGLKWMGWINTYSGVPTYADDLKGRFAFSLETSASTAYLQINNLKNEDTATYFCARGPYAMDYWGQGTSVTVSSAKTTPPSVYPLAPVCGDTTGSSVTLGCLVKGYFPEPVTLTWNSGSLSSGVHTFPAVLQSDLYTLSSSVTVTSSTWPSQSITCNVAHPASSTKVDKKIEPRGPTIKPCPPCKCPAPNAAGGPSVFIFPPKIKDVLMISLSPIVTCVVVDVSEDDPDVQISWFVNNVEVHTAQTQTHREDYNSTLRVVSALPIQHQDWMSGKEFKCKVNNKDLGAPIERTISKPKGSVRAPQVYVLPPPEEEMTKKQVTLTCMVTDFMPEDIYVEWTNNGKTELNYKNTEPVLDSDGSYFMYSKLRVEKKNWVERNSYSCSVVHEGLHNHHTTKSFSRTPGK

SEQ ID NO: 455 - protein, 445 aa, synthetic construct
  REGION 1..445: note = 20D11.2C6 heavy chain peptide sequence
EVQLQQSGPELVKPGASVKISCKASGYTFTDFYINWVKQSHGKSLEWIGDINPKNGGINYNPKFKIKATLTVDKSSSTSYMDLRGLTSEDSAVYYCTSGYGFPYWGQGTLVTVSAAKTTPPSVYPLAPVCGDTTGSSVTLGCLVKGYFPEPVTLTWNSGSLSSGVHTFPAVLQSDLYTLSSSVTVTSSTWPSQSITCNVAHPASSTKVDKKIEPRGPTIKPCPPCKCPAPNAAGGPSVFIFPPKIKDVLMISLSPIVTCVVVDVSEDDPDVQISWFVNNVEVHTAQTQTHREDYNSTLRVVSALPIQHQDWMSGKEFKCKVNNKDLGAPIERTISKPKGSVRAPQVYVLPPPEEEMTKKQVTLTCMVTDFMPEDIYVEWTNNGKTELNYKNTEPVLDSDGSYFMYSKLRVEKKNWVERNSYSCSVVHEGLHNHHTTKSFSRTPGK

SEQ ID NO: 456 - protein, 446 aa, synthetic construct
  REGION 1..446: note = 20H5.A3 heavy chain peptide sequence
QIQLVQSGPELKKPGESVKISCKASGYAFTTYGMSWVQQAPGKGLKWMGWVNTYSGVPTCADDFKGRFAFSLETSASTAYLQINNLRNEDTATYFCARGPYAMDYWGQGTSVTVSSAKTTPPSVYPLAPVCGDTTGSSVTLGCLVKGYFPEPVTLTWNSGSLSSGVHTFPAVLQSDLYTLSSSVTVTSSTWPSQSITCNVAHPASSTKVDKKIEPRGPTIKPCPPCKCPAPNAAGGPSVFIFPPKIKDVLMISLSPIVTCVVVDVSEDDPDVQISWFVNNVEVHTAQTQTHREDYNSTLRVVSALPIQHQDWMSGKEFKCKVNNKDLGAPIERTISKPKGSVRAPQVYVLPPPEEEMTKKQVTLTCMVTDFMPEDIYVEWTNNGKTELNYKNTEPVLDSDGSYFMYSKLRVEKKNWVERNSYSCSVVHEGLHNHHTTKSFSRTPGK

SEQ ID NO: 457 - protein, 446 aa, synthetic construct; identical to SEQ ID NO: 454
  REGION 1..446: note = 23H9.2E4 heavy chain peptide sequence

SEQ ID NO: 458 - protein, 450 aa, synthetic construct
  REGION 1..450: note = 2D10.2B2 heavy chain peptide sequence
QVQLQQSGPELVKPGASVKISCKASGYTFTDYYINWVKQRPGQGLEWIGWIYPGSNDTKYNEKFKGKATLTVDTSSSTAYMQLGSLTSEDSAVYFCANYFGCSGWFFDVWGTGTTVTVSSAKTTPPSVYPLAPVCGDTTGSSVTLGCLVKGYFPEPVTLTWNSGSLSSGVHTFPAVLQSDLYTLSSSVTVTSSTWPSQSITCNVAHPASSTKVDKKIEPRGPTIKPCPPCKCPAPNAAGGPSVFIFPPKIKDVLMISLSPIVTCVVVDVSEDDPDVQISWFVNNVEVHTAQTQTHREDYNSTLRVVSALPIQHQDWMSGKEFKCKVNNKDLGAPIERTISKPKGSVRAPQVYVLPPPEEEMTKKQVTLTCMVTDFMPEDIYVEWTNNGKTELNYKNTEPVLDSDGSYFMYSKLRVEKKNWVERNSYSCSVVHEGLHNHHTTKSFSRTPGK

SEQ ID NO: 459 - protein, 449 aa, synthetic construct; identical to SEQ ID NO: 451
  REGION 1..449: note = 3B11.2G2 heavy chain peptide sequence

SEQ ID NO: 460 - protein, 443 aa, synthetic construct
  REGION 1..443: note = 7D8.2D8 heavy chain peptide sequence
EVQLVESGGGLVKPGGSLKLSCAASGFTFSSYAMSWVRQTPEKRLEWVATISDGGIYTYYPDNVKGRFTISRDNAKNNLFLQMSHLKSEDTAMYYCVRDGGYWGQGTTLTVSSAKTTPPSVYPLAPVCGDTTGSSVTLGCLVKGYFPEPVTLTWNSGSLSSGVHTFPAVLQSDLYTLSSSVTVTSSTWPSQSITCNVAHPASSTKVDKKIEPRGPTIKPCPPCKCPAPNAAGGPSVFIFPPKIKDVLMISLSPIVTCVVVDVSEDDPDVQISWFVNNVEVHTAQTQTHREDYNSTLRVVSALPIQHQDWMSGKEFKCKVNNKDLGAPIERTISKPKGSVRAPQVYVLPPPEEEMTKKQVTLTCMVTDFMPEDIYVEWTNNGKTELNYKNTEPVLDSDGSYFMYSKLRVEKKNWVERNSYSCSVVHEGLHNHHTTKSFSRTPGK

SEQ ID NO: 461 - protein, 446 aa, synthetic construct
  REGION 1..446: note = mTB001 heavy chain peptide sequence
QIQLVQSGPELKKPGETVKISCKASGYTFTNYGMNWVKQAPGKGLKWMGWINTNTGEPTYVEEFKGRFAFSLETSASTAYLQINNLKNEDTATYFCAPYDNFFAYWGQGTLVTVSAAKTTPPSVYPLAPVCGDTTGSSVTLGCLVKGYFPEPVTLTWNSGSLSSGVHTFPAVLQSDLYTLSSSVTVTSSTWPSQSITCNVAHPASSTKVDKKIEPRGPTIKPCPPCKCPAPNAAGGPSVFIFPPKIKDVLMISLSPIVTCVVVDVSEDDPDVQISWFVNNVEVHTAQTQTHREDYNSTLRVVSALPIQHQDWMSGKEFKCKVNNKDLGAPIERTISKPKGSVRAPQVYVLPPPEEEMTKKQVTLTCMVTDFMPEDIYVEWTNNGKTELNYKNTEPVLDSDGSYFMYSKLRVEKKNWVERNSYSCSVVHEGLHNHHTTKSFSRTPGK

SEQ ID NO: 462 - protein, 442 aa, synthetic construct
  REGION 1..442: note = 4A11.2B5 heavy chain peptide sequence
QVQLQQSGPELVKPGASVKISCKASGYSFTNYYIHWVKQRPGQGLEWIGWIYPGSGNTNYNEKFKGKATLTADTSSSTTNMQLSSLTSEDSAVYYCSTAPGGFDVWGSGTTVTVSSASTKGPSVFPLAPCSRSTSESTAALGCLVKDYFPEPVTVSWNSGALTSGVHTFPAVLQSSGLYSLSSVVTVPSSSLGTKTYTCNVDHKPSNTKVDKRVESKYGPPCPPCPAPEFLGGPSVFLFPPKPKDTLMISRTPEVTCVVVDVSQEDPEVQFNWYVDGVEVHNAKTKPREEQFNSTYRVVSVLTVLHQDWLNGKEYKCKVSNKGLPSSIEKTISKAKGQPREPQVYTLPPSQEEMTKNQVSLTCLVKGFYPSDIAVEWESNGQPENNYKTTPPVLDSDGSFFLYSRLTVDKSRWQEGNVFSCSVMHEALHNHYTQKSLSLSLG

SEQ ID NO: 463 - protein, 442 aa, synthetic construct
  REGION 1..442: note = 4A11.H1L1 heavy chain peptide sequence
QVQLVQSGAEVKKPGASVKVSCKASGYSFTNYYMHWVRQAPGQGLEWMGWIYPGSGNTNYNEKFQGRVTMTADTSISTAYMELSRLRSDDTAVYYCSTAPGGFDVWGQGTTVTVSSASTKGPSVFPLAPCSRSTSESTAALGCLVKDYFPEPVTVSWNSGALTSGVHTFPAVLQSSGLYSLSSVVTVPSSSLGTKTYTCNVDHKPSNTKVDKRVESKYGPPCPPCPAPEFLGGPSVFLFPPKPKDTLMISRTPEVTCVVVDVSQEDPEVQFNWYVDGVEVHNAKTKPREEQFNSTYRVVSVLTVLHQDWLNGKEYKCKVSNKGLPSSIEKTISKAKGQPREPQVYTLPPSQEEMTKNQVSLTCLVKGFYPSDIAVEWESNGQPENNYKTTPPVLDSDGSFFLYSRLTVDKSRWQEGNVFSCSVMHEALHNHYTQKSLSLSLG

SEQ ID NO: 464 - protein, 442 aa, synthetic construct
  REGION 1..442: note = 4A11.H4L2 heavy chain peptide sequence
QVQLVQSGAEVKKPGASVKVSCKASGYSFTNYYIHWVRQAPGQRLEWMGWIYPGSGNTNYNEKFQGRVTLTADTSASTTYMELSSLRSEDTAVYYCSTAPGGFDVWGQGTTVTVSSASTKGPSVFPLAPCSRSTSESTAALGCLVKDYFPEPVTVSWNSGALTSGVHTFPAVLQSSGLYSLSSVVTVPSSSLGTKTYTCNVDHKPSNTKVDKRVESKYGPPCPPCPAPEFLGGPSVFLFPPKPKDTLMISRTPEVTCVVVDVSQEDPEVQFNWYVDGVEVHNAKTKPREEQFNSTYRVVSVLTVLHQDWLNGKEYKCKVSNKGLPSSIEKTISKAKGQPREPQVYTLPPSQEEMTKNQVSLTCLVKGFYPSDIAVEWESNGQPENNYKTTPPVLDSDGSFFLYSRLTVDKSRWQEGNVFSCSVMHEALHNHYTQKSLSLSLG

SEQ ID NO: 465 - protein, 445 aa, synthetic construct
  REGION 1..445: note = 4G2.2G6 heavy chain peptide sequence
QIQLVQSGPDLKKPGETVKISCKASGYTFTTYVMSWVKQAPGKDLKWMGWINTHSGVPTYADDFKGRFDFSLETSANTAFLQINNLKNEDTATYFCTRDGNDGDAMDNWGQGTSVTVSSASTKGPSVFPLAPCSRSTSESTAALGCLVKDYFPEPVTVSWNSGALTSGVHTFPAVLQSSGLYSLSSVVTVPSSSLGTKTYTCNVDHKPSNTKVDKRVESKYGPPCPPCPAPEFLGGPSVFLFPPKPKDTLMISRTPEVTCVVVDVSQEDPEVQFNWYVDGVEVHNAKTKPREEQFNSTYRVVSVLTVLHQDWLNGKEYKCKVSNKGLPSSIEKTISKAKGQPREPQVYTLPPSQEEMTKNQVSLTCLVKGFYPSDIAVEWESNGQPENNYKTTPPVLDSDGSFFLYSRLTVDKSRWQEGNVFSCSVMHEALHNHYTQKSLSLSLG

SEQ ID NO: 466 - protein, 446 aa, synthetic construct
  REGION 1..446: note = 6B3.2D3 heavy chain peptide sequence
QVQLKQSGPGLVQPSQSLSITCTVSGFSLTSYGVHWVRQPPGKGLEWLGVIWSGGSTDYNAAFISRLSISKDNSKSQVFFKMNSLQADDTAIYYCAKGPYDYDLGWFAYWGQGTLVTVSAASTKGPSVFPLAPCSRSTSESTAALGCLVKDYFPEPVTVSWNSGALTSGVHTFPAVLQSSGLYSLSSVVTVPSSSLGTKTYTCNVDHKPSNTKVDKRVESKYGPPCPPCPAPEFLGGPSVFLFPPKPKDTLMISRTPEVTCVVVDVSQEDPEVQFNWYVDGVEVHNAKTKPREEQFNSTYRVVSVLTVLHQDWLNGKEYKCKVSNKGLPSSIEKTISKAKGQPREPQVYTLPPSQEEMTKNQVSLTCLVKGFYPSDIAVEWESNGQPENNYKTTPPVLDSDGSFFLYSRLTVDKSRWQEGNVFSCSVMHEALHNHYTQKSLSLSLG

SEQ ID NO: 467 - protein, 442 aa, synthetic construct
  REGION 1..442: note = 6H6.2D6 heavy chain peptide sequence
QIQLVQSGPELKKPGETVKISCKASGYTFTTYGMSWVKQAPGKGLKWMAWINTYSGVPTYADDFKGRFAFSLETSASTAYLQINNLTNEDTATYFCARGPYAMDYWGQGTSVTVSSASTKGPSVFPLAPCSRSTSESTAALGCLVKDYFPEPVTVSWNSGALTSGVHTFPAVLQSSGLYSLSSVVTVPSSSLGTKTYTCNVDHKPSNTKVDKRVESKYGPPCPPCPAPEFLGGPSVFLFPPKPKDTLMISRTPEVTCVVVDVSQEDPEVQFNWYVDGVEVHNAKTKPREEQFNSTYRVVSVLTVLHQDWLNGKEYKCKVSNKGLPSSIEKTISKAKGQPREPQVYTLPPSQEEMTKNQVSLTCLVKGFYPSDIAVEWESNGQPENNYKTTPPVLDSDGSFFLYSRLTVDKSRWQEGNVFSCSVMHEALHNHYTQKSLSLSLG

SEQ ID NO: 468 - protein, 441 aa, synthetic construct
  REGION 1..441: note = 9H2.2H10 heavy chain peptide sequence
QVQLQQPGAELVGPGSSVKLSCKASGYTFTNYWIHWVKQRPLQGLEWIGNIDPSDSETHYNQKFKDKATLTVDKSSSTAYMQLSSLTSEDSAVYYCARHGYYDYWGQGTTLTVSSASTKGPSVFPLAPCSRSTSESTAALGCLVKDYFPEPVTVSWNSGALTSGVHTFPAVLQSSGLYSLSSVVTVPSSSLGTKTYTCNVDHKPSNTKVDKRVESKYGPPCPPCPAPEFLGGPSVFLFPPKPKDTLMISRTPEVTCVVVDVSQEDPEVQFNWYVDGVEVHNAKTKPREEQFNSTYRVVSVLTVLHQDWLNGKEYKCKVSNKGLPSSIEKTISKAKGQPREPQVYTLPPSQEEMTKNQVSLTCLVKGFYPSDIAVEWESNGQPENNYKTTPPVLDSDGSFFLYSRLTVDKSRWQEGNVFSCSVMHEALHNHYTQKSLSLSLG

SEQ ID NO: 469 - protein, 445 aa, synthetic construct
  REGION 1..445: note = 13G4.2F8 heavy chain peptide sequence
QVQLQQPGAELVKPGASVKLSCKASGYTFTSYWMHWVKQRPGQGLEWIGMIHPNSGSTDYNEKFKNKATLNVDKSSSTAYIQLSSLTSEDSAVYYCTRWGIYYYARDYWGQGTTLTVSSASTKGPSVFPLAPCSRSTSESTAALGCLVKDYFPEPVTVSWNSGALTSGVHTFPAVLQSSGLYSLSSVVTVPSSSLGTKTYTCNVDHKPSNTKVDKRVESKYGPPCPPCPAPEFLGGPSVFLFPPKPKDTLMISRTPEVTCVVVDVSQEDPEVQFNWYVDGVEVHNAKTKPREEQFNSTYRVVSVLTVLHQDWLNGKEYKCKVSNKGLPSSIEKTISKAKGQPREPQVYTLPPSQEEMTKNQVSLTCLVKGFYPSDIAVEWESNGQPENNYKTTPPVLDSDGSFFLYSRLTVDKSRWQEGNVFSCSVMHEALHNHYTQKSLSLSLG

SEQ ID NO: 470 - protein, 443 aa, synthetic construct
  REGION 1..443: note = 13H12.2F8 heavy chain peptide sequence
QIQLVQSGPELKKPGETVKISCKASGYTFTTYGMSWVKQAPGKGLKWMGWINTYSGVPTYADDFKGRFAFSLETSASTAYLQINNLKNEDTATYFCAVPYEYDGAYWGQGTLVTVSAASTKGPSVFPLAPCSRSTSESTAALGCLVKDYFPEPVTVSWNSGALTSGVHTFPAVLQSSGLYSLSSVVTVPSSSLGTKTYTCNVDHKPSNTKVDKRVESKYGPPCPPCPAPEFLGGPSVFLFPPKPKDTLMISRTPEVTCVVVDVSQEDPEVQFNWYVDGVEVHNAKTKPREEQFNSTYRVVSVLTVLHQDWLNGKEYKCKVSNKGLPSSIEKTISKAKGQPREPQVYTLPPSQEEMTKNQVSLTCLVKGFYPSDIAVEWESNGQPENNYKTTPPVLDSDGSFFLYSRLTVDKSRWQEGNVFSCSVMHEALHNHYTQKSLSLSLG

SEQ ID NO: 471 - protein, 441 aa, synthetic construct
  REGION 1..441: note = 15G7.2A7 heavy chain peptide sequence
EVQLQQSGPELVKPGASVKISCKASGYTFTDYYMNWVKQSHGKSLEWIGDINPNNGGTNYNQKFKGKATLTVDKSSSTAYMELRSLTSEDSAVYYCTSGYGFPYWGQGTLVTVSAASTKGPSVFPLAPCSRSTSESTAALGCLVKDYFPEPVTVSWNSGALTSGVHTFPAVLQSSGLYSLSSVVTVPSSSLGTKTYTCNVDHKPSNTKVDKRVESKYGPPCPPCPAPEFLGGPSVFLFPPKPKDTLMISRTPEVTCVVVDVSQEDPEVQFNWYVDGVEVHNAKTKPREEQFNSTYRVVSVLTVLHQDWLNGKEYKCKVSNKGLPSSIEKTISKAKGQPREPQVYTLPPSQEEMTKNQVSLTCLVKGFYPSDIAVEWESNGQPENNYKTTPPVLDSDGSFFLYSRLTVDKSRWQEGNVFSCSVMHEALHNHYTQKSLSLSLG

SEQ ID NO: 472 - protein, 443 aa, synthetic construct
  REGION 1..443: note = 19D9.2E5 heavy chain peptide sequence
QIQLVQSGPELKKPGETVKISCKASGYTFTTYGMGWVKQAPGKGLKWMGWINTYSGVPTYADDFKGRFAFSLETSTSTAYLQINNLKNEDMATYFCATPYEYDGAYWGQGTLVTVSAASTKGPSVFPLAPCSRSTSESTAALGCLVKDYFPEPVTVSWNSGALTSGVHTFPAVLQSSGLYSLSSVVTVPSSSLGTKTYTCNVDHKPSNTKVDKRVESKYGPPCPPCPAPEFLGGPSVFLFPPKPKDTLMISRTPEVTCVVVDVSQEDPEVQFNWYVDGVEVHNAKTKPREEQFNSTYRVVSVLTVLHQDWLNGKEYKCKVSNKGLPSSIEKTISKAKGQPREPQVYTLPPSQEEMTKNQVSLTCLVKGFYPSDIAVEWESNGQPENNYKTTPPVLDSDGSFFLYSRLTVDKSRWQEGNVFSCSVMHEALHNHYTQKSLSLSLG

SEQ ID NO: 473 - protein, 438 aa, synthetic construct
  REGION 1..438: note = 23B10.2B12 heavy chain peptide sequence
QVQLQQSGPELVKPGDSVKISCKAAGYTFSDYYINWVKQRPGQGLEWIGWIYPVSVNTKYNEKFKGKATLTVDTSSSTAYMQLSSLTSEDSGVYFCAYLDYWGQGTLVTVSAASTKGPSVFPLAPCSRSTSESTAALGCLVKDYFPEPVTVSWNSGALTSGVHTFPAVLQSSGLYSLSSVVTVPSSSLGTKTYTCNVDHKPSNTKVDKRVESKYGPPCPPCPAPEFLGGPSVFLFPPKPKDTLMISRTPEVTCVVVDVSQEDPEVQFNWYVDGVEVHNAKTKPREEQFNSTYRVVSVLTVLHQDWLNGKEYKCKVSNKGLPSSIEKTISKAKGQPREPQVYTLPPSQEEMTKNQVSLTCLVKGFYPSDIAVEWESNGQPENNYKTTPPVLDSDGSFFLYSRLTVDKSRWQEGNVFSCSVMHEALHNHYTQKSLSLSLG

SEQ ID NO: 474 - protein, 446 aa, synthetic construct
  REGION 1..446: note = 24D12.2H9 heavy chain peptide sequence
QVQLKQSGPGLVQPSQSLSITCTVSGFSLTSYGVHWVRQAPGKGLEWLGVIWSGGSTDYNAAFMSRLSISKDNSKSQVFFKMNSLQADDTAIYYCAKSPDGYDVAWFGYWGQGTLVTVSAASTKGPSVFPLAPCSRSTSESTAALGCLVKDYFPEPVTVSWNSGALTSGVHTFPAVLQSSGLYSLSSVVTVPSSSLGTKTYTCNVDHKPSNTKVDKRVESKYGPPCPPCPAPEFLGGPSVFLFPPKPKDTLMISRTPEVTCVVVDVSQEDPEVQFNWYVDGVEVHNAKTKPREEQFNSTYRVVSVLTVLHQDWLNGKEYKCKVSNKGLPSSIEKTISKAKGQPREPQVYTLPPSQEEMTKNQVSLTCLVKGFYPSDIAVEWESNGQPENNYKTTPPVLDSDGSFFLYSRLTVDKSRWQEGNVFSCSVMHEALHNHYTQKSLSLSLG

SEQ ID NO: 475 - protein, 448 aa, synthetic construct
  REGION 1..448: note = F846C.1B2 heavy chain peptide sequence
QIQLVQSGPELKKPGETVKISCKASGYTFTNYGMNWVKQAPGKGLKWMGWINTYTGEPSYADDFKGRFAFSLETSASTAYLQINNLKNEDMATYFCARWGGYAGDYYAMDFWGQGTSVTVSSASTKGPSVFPLAPCSRSTSESTAALGCLVKDYFPEPVTVSWNSGALTSGVHTFPAVLQSSGLYSLSSVVTVPSSSLGTKTYTCNVDHKPSNTKVDKRVESKYGPPCPPCPAPEFLGGPSVFLFPPKPKDTLMISRTPEVTCVVVDVSQEDPEVQFNWYVDGVEVHNAKTKPREEQFNSTYRVVSVLTVLHQDWLNGKEYKCKVSNKGLPSSIEKTISKAKGQPREPQVYTLPPSQEEMTKNQVSLTCLVKGFYPSDIAVEWESNGQPENNYKTTPPVLDSDGSFFLYSRLTVDKSRWQEGNVFSCSVMHEALHNHYTQKSLSLSLG

SEQ ID NO: 476 - protein, 448 aa, synthetic construct
  REGION 1..448: note = F846C.1F5 heavy chain peptide sequence
QIQLVQSGPELKKPGETVKISCKASGYTFTNYGMNWVKQAPGKGLKWMGWINTYTGEPSYADDFKGRFAFSLETSASTAYLQINNLKNEDMATYFCARWGGYDGDYYAMDYWGQGTSVTVSSASTKGPSVFPLAPCSRSTSESTAALGCLVKDYFPEPVTVSWNSGALTSGVHTFPAVLQSSGLYSLSSVVTVPSSSLGTKTYTCNVDHKPSNTKVDKRVESKYGPPCPPCPAPEFLGGPSVFLFPPKPKDTLMISRTPEVTCVVVDVSQEDPEVQFNWYVDGVEVHNAKTKPREEQFNSTYRVVSVLTVLHQDWLNGKEYKCKVSNKGLPSSIEKTISKAKGQPREPQVYTLPPSQEEMTKNQVSLTCLVKGFYPSDIAVEWESNGQPENNYKTTPPVLDSDGSFFLYSRLTVDKSRWQEGNVFSCSVMHEALHNHYTQKSLSLSLG

SEQ ID NO: 477 - protein, 448 aa, synthetic construct
  REGION 1..448: note = F846C.1H12 heavy chain peptide sequence
QIQLVQSGPELKKPGETVKISCKASGYTFTNFGMNWVKQAPGKGLKWMGWINTYTGEPSYADDFKGRFAFSLETSASTAYLQINNLKNEDIATYFCARWGGYAGDYYAMDYWGQGTSVTVSSASTKGPSVFPLAPCSRSTSESTAALGCLVKDYFPEPVTVSWNSGALTSGVHTFPAVLQSSGLYSLSSVVTVPSSSLGTKTYTCNVDHKPSNTKVDKRVESKYGPPCPPCPAPEFLGGPSVFLFPPKPKDTLMISRTPEVTCVVVDVSQEDPEVQFNWYVDGVEVHNAKTKPREEQFNSTYRVVSVLTVLHQDWLNGKEYKCKVSNKGLPSSIEKTISKAKGQPREPQVYTLPPSQEEMTKNQVSLTCLVKGFYPSDIAVEWESNGQPENNYKTTPPVLDSDGSFFLYSRLTVDKSRWQEGNVFSCSVMHEALHNHYTQKSLSLSLG

SEQ ID NO: 478 - protein, 442 aa, synthetic construct
  REGION 1..442: note = F846C.1H5 heavy chain peptide sequence
EVQLLESGGGLVKPGGSLKLSCAASGFTFSSYAMSWVRQTPEKRLEWVASISSGGDTYYPDSVKGRFTISRDNARNILYLQMSSLRSEDTAMYYCASYGNSLFDYWGQGTTLTVSSASTKGPSVFPLAPCSRSTSESTAALGCLVKDYFPEPVTVSWNSGALTSGVHTFPAVLQSSGLYSLSSVVTVPSSSLGTKTYTCNVDHKPSNTKVDKRVESKYGPPCPPCPAPEFLGGPSVFLFPPKPKDTLMISRTPEVTCVVVDVSQEDPEVQFNWYVDGVEVHNAKTKPREEQFNSTYRVVSVLTVLHQDWLNGKEYKCKVSNKGLPSSIEKTISKAKGQPREPQVYTLPPSQEEMTKNQVSLTCLVKGFYPSDIAVEWESNGQPENNYKTTPPVLDSDGSFFLYSRLTVDKSRWQEGNVFSCSVMHEALHNHYTQKSLSLSLG

SEQ ID NO: 479 - protein, 448 aa, synthetic construct; identical to SEQ ID NO: 476
  REGION 1..448: note = F846C.2H3 heavy chain peptide sequence

SEQ ID NO: 480 - protein, 440 aa, synthetic construct
  REGION 1..440: note = F846TC.14A2 heavy chain peptide sequence
QIQLVQSGPELKKPGETVKISCKASGYTFTNYGMNWVKQAPGKGLKWMGWINTYTGEPTYAGDLKGRFAFSLETSASTAYLQINNLKNEDTATYFCVRYTMDYWGQGTSVTVSSASTKGPSVFPLAPCSRSTSESTAALGCLVKDYFPEPVTVSWNSGALTSGVHTFPAVLQSSGLYSLSSVVTVPSSSLGTKTYTCNVDHKPSNTKVDKRVESKYGPPCPPCPAPEFLGGPSVFLFPPKPKDTLMISRTPEVTCVVVDVSQEDPEVQFNWYVDGVEVHNAKTKPREEQFNSTYRVVSVLTVLHQDWLNGKEYKCKVSNKGLPSSIEKTISKAKGQPREPQVYTLPPSQEEMTKNQVSLTCLVKGFYPSDIAVEWESNGQPENNYKTTPPVLDSDGSFFLYSRLTVDKSRWQEGNVFSCSVMHEALHNHYTQKSLSLSLG

SEQ ID NO: 481 - protein, 450 aa, synthetic construct
  REGION 1..450: note = F846TC.14E4 heavy chain peptide sequence
QVTLKESGPGILQPSQTLSLTCSFSGFSLSTSGMGVGWIRQPSGKGLEWLAHIWWDDDKYYNTALKSGLTISKDASKNQVFLKIASMDTADTATYYCARNLYDGSYGYYAMDYWGQGTSVTVSSASTKGPSVFPLAPCSRSTSESTAALGCLVKDYFPEPVTVSWNSGALTSGVHTFPAVLQSSGLYSLSSVVTVPSSSLGTKTYTCNVDHKPSNTKVDKRVESKYGPPCPPCPAPEFLGGPSVFLFPPKPKDTLMISRTPEVTCVVVDVSQEDPEVQFNWYVDGVEVHNAKTKPREEQFNSTYRVVSVLTVLHQDWLNGKEYKCKVSNKGLPSSIEKTISKAKGQPREPQVYTLPPSQEEMTKNQVSLTCLVKGFYPSDIAVEWESNGQPENNYKTTPPVLDSDGSFFLYSRLTVDKSRWQEGNVFSCSVMHEALHNHYTQKSLSLSLG

SEQ ID NO: 482 - protein, 448 aa, synthetic construct
  REGION 1..448: note = F846TC.16B5 heavy chain peptide sequence
QIQLVQSGPELKKPGETVKISCKASGYTFTNYGMNWVKQAPGKGLKWMGWINTYTGEPAYADDFKGRFAFSLETSASTAYLQINNLKNEDMATYFCARWGGYDGDYYAMDYWGQGTSVTVSSASTKGPSVFPLAPCSRSTSESTAALGCLVKDYFPEPVTVSWNSGALTSGVHTFPAVLQSSGLYSLSSVVTVPSSSLGTKTYTCNVDHKPSNTKVDKRVESKYGPPCPPCPAPEFLGGPSVFLFPPKPKDTLMISRTPEVTCVVVDVSQEDPEVQFNWYVDGVEVHNAKTKPREEQFNSTYRVVSVLTVLHQDWLNGKEYKCKVSNKGLPSSIEKTISKAKGQPREPQVYTLPPSQEEMTKNQVSLTCLVKGFYPSDIAVEWESNGQPENNYKTTPPVLDSDGSFFLYSRLTVDKSRWQEGNVFSCSVMHEALHNHYTQKSLSLSLG

SEQ ID NO: 483 - protein, 449 aa, synthetic construct
  REGION 1..449: note = F846TC.7F10 heavy chain peptide sequence
EVQLVESGGDLVKPGGSLKLSCAASGFTFSNYGLSWIRQTPDKRLEWVATISSGGSYTYYPDSVKGRFTISRDSAKNTLYLQMSSLKSEDTAMYYCARHAHYYGVSPYYFDYWGQGTCLTVSSASTKGPSVFPLAPCSRSTSESTAALGCLVKDYFPEPVTVSWNSGALTSGVHTFPAVLQSSGLYSLSSVVTVPSSSLGTKTYTCNVDHKPSNTKVDKRVESKYGPPCPPCPAPEFLGGPSVFLFPPKPKDTLMISRTPEVTCVVVDVSQEDPEVQFNWYVDGVEVHNAKTKPREEQFNSTYRVVSVLTVLHQDWLNGKEYKCKVSNKGLPSSIEKTISKAKGQPREPQVYTLPPSQEEMTKNQVSLTCLVKGFYPSDIAVEWESNGQPENNYKTTPPVLDSDGSFFLYSRLTVDKSRWQEGNVFSCSVMHEALHNHYTQKSLSLSLG

SEQ ID NO: 484 - protein, 445 aa, synthetic construct
  REGION 1..445: note = F847C.10B9 heavy chain peptide sequence
QIQLVQSGPEVKKPGETVKISCKASGYIFTNYGMNWVKQAPGKGLKWMGWINTYTGEPTYTDDFKGRFAFSLETSASTAYLQINNLKNEDTATYFCAKFGNYVGAMDYWGQGTSVTVSSASTKGPSVFPLAPCSRSTSESTAALGCLVKDYFPEPVTVSWNSGALTSGVHTFPAVLQSSGLYSLSSVVTVPSSSLGTKTYTCNVDHKPSNTKVDKRVESKYGPPCPPCPAPEFLGGPSVFLFPPKPKDTLMISRTPEVTCVVVDVSQEDPEVQFNWYVDGVEVHNAKTKPREEQFNSTYRVVSVLTVLHQDWLNGKEYKCKVSNKGLPSSIEKTISKAKGQPREPQVYTLPPSQEEMTKNQVSLTCLVKGFYPSDIAVEWESNGQPENNYKTTPPVLDSDGSFFLYSRLTVDKSRWQEGNVFSCSVMHEALHNHYTQKSLSLSLG

SEQ ID NO: 485 - protein, 446 aa, synthetic construct
  REGION 1..446: note = F847C.11B1 heavy chain peptide sequence
EVQLQQSGPELVKPGASVKISCKASGNTFTDHNMHWVKQSHGKSLEWIGYIYPYNGGTGYNQKFKSKATLTVDNSSSTVYMELRSLTSEDSAVYYCARGEYDYLAWFAYWGQGTLVTVSAASTKGPSVFPLAPCSRSTSESTAALGCLVKDYFPEPVTVSWNSGALTSGVHTFPAVLQSSGLYSLSSVVTVPSSSLGTKTYTCNVDHKPSNTKVDKRVESKYGPPCPPCPAPEFLGGPSVFLFPPKPKDTLMISRTPEVTCVVVDVSQEDPEVQFNWYVDGVEVHNAKTKPREEQFNSTYRVVSVLTVLHQDWLNGKEYKCKVSNKGLPSSIEKTISKAKGQPREPQVYTLPPSQEEMTKNQVSLTCLVKGFYPSDIAVEWESNGQPENNYKTTPPVLDSDGSFFLYSRLTVDKSRWQEGNVFSCSVMHEALHNHYTQKSLSLSLG

SEQ ID NO: 486 - protein, 445 aa, synthetic construct
  REGION 1..445: note = F847C.12F12 heavy chain peptide sequence
QIQLVQSGPELKKPGETVKISCKASGYTFTNYGMNWVKQAPGKGLKWMGWINTYTGEPTYVDDFKGRFAFSLETSASTAYLRINNLKNEDTATYFCAKFGNYVGAMDYWGQGTSVTVSSASTKGPSVFPLAPCSRSTSESTAALGCLVKDYFPEPVTVSWNSGALTSGVHTFPAVLQSSGLYSLSSVVTVPSSSLGTKTYTCNVDHKPSNTKVDKRVESKYGPPCPPCPAPEFLGGPSVFLFPPKPKDTLMISRTPEVTCVVVDVSQEDPEVQFNWYVDGVEVHNAKTKPREEQFNSTYRVVSVLTVLHQDWLNGKEYKCKVSNKGLPSSIEKTISKAKGQPREPQVYTLPPSQEEMTKNQVSLTCLVKGFYPSDIAVEWESNGQPENNYKTTPPVLDSDGSFFLYSRLTVDKSRWQEGNVFSCSVMHEALHNHYTQKSLSLSLG

SEQ ID NO: 487 - protein, 445 aa, synthetic construct; identical to SEQ ID NO: 484
  REGION 1..445: note = F847C.26F5 heavy chain peptide sequence

SEQ ID NO: 488 - protein, 443 aa, synthetic construct
  REGION 1..443: note = F847C.4B10 heavy chain peptide sequence
EVQLVETGGGLVKPGGSLKLSCAASGFTFSSYAMSWVRQTPEKRLEWVASISSGGSTYYPDSVKGRFTISRDNARNILYLQMSSLRSEDTAMYYCTRFTTVVEMDYWGQGTSVTVSSASTKGPSVFPLAPCSRSTSESTAALGCLVKDYFPEPVTVSWNSGALTSGVHTFPAVLQSSGLYSLSSVVTVPSSSLGTKTYTCNVDHKPSNTKVDKRVESKYGPPCPPCPAPEFLGGPSVFLFPPKPKDTLMISRTPEVTCVVVDVSQEDPEVQFNWYVDGVEVHNAKTKPREEQFNSTYRVVSVLTVLHQDWLNGKEYKCKVSNKGLPSSIEKTISKAKGQPREPQVYTLPPSQEEMTKNQVSLTCLVKGFYPSDIAVEWESNGQPENNYKTTPPVLDSDGSFFLYSRLTVDKSRWQEGNVFSCSVMHEALHNHYTQKSLSLSLG

SEQ ID NO: 489 - protein, 438 aa, synthetic construct
  REGION 1..438: note = F849C.8D10 heavy chain peptide sequence
QVQLQQTGAELVKPGASVKLSCKASGYTFTSYWINWVKQRPGQGLEWIGNIYPGSSSIYYSEKFKSKATLTVDTSSSTAYMQLSSLTSDDSAVYYCARWGYWGQGTTLTVSSASTKGPSVFPLAPCSRSTSESTAALGCLVKDYFPEPVTVSWNSGALTSGVHTFPAVLQSSGLYSLSSVVTVPSSSLGTKTYTCNVDHKPSNTKVDKRVESKYGPPCPPCPAPEFLGGPSVFLFPPKPKDTLMISRTPEVTCVVVDVSQEDPEVQFNWYVDGVEVHNAKTKPREEQFNSTYRVVSVLTVLHQDWLNGKEYKCKVSNKGLPSSIEKTISKAKGQPREPQVYTLPPSQEEMTKNQVSLTCLVKGFYPSDIAVEWESNGQPENNYKTTPPVLDSDGSFFLYSRLTVDKSRWQEGNVFSCSVMHEALHNHYTQKSLSLSLG

SEQ ID NO: 490 - protein, 447 aa, synthetic construct
  REGION 1..447: note = F849C.8H3 heavy chain peptide sequence
QVTLKESGPGILQPSQTLSLTCSFSGFSLSTFGMGVGWIRQPSGKGLEWLAHIWWDDDKHYNPALKSRLTISKDTSKNQVFLRIANVDTADNATYYCARIDYGDYVGFAYWGQGTLVTVSAASTKGPSVFPLAPCSRSTSESTAALGCLVKDYFPEPVTVSWNSGALTSGVHTFPAVLQSSGLYSLSSVVTVPSSSLGTKTYTCNVDHKPSNTKVDKRVESKYGPPCPPCPAPEFLGGPSVFLFPPKPKDTLMISRTPEVTCVVVDVSQEDPEVQFNWYVDGVEVHNAKTKPREEQFNSTYRVVSVLTVLHQDWLNGKEYKCKVSNKGLPSSIEKTISKAKGQPREPQVYTLPPSQEEMTKNQVSLTCLVKGFYPSDIAVEWESNGQPENNYKTTPPVLDSDGSFFLYSRLTVDKSRWQEGNVFSCSVMHEALHNHYTQKSLSLSLG

SEQ ID NO: 491 - protein, 444 aa, synthetic construct
  REGION 1..444: note = 846.2B11 heavy chain peptide sequence
QVQLQQSGPELVRPGALVKISCKASGYTFTSYDINWVKQRPGQGLEWIGWIYPGDGSTKYNEKFKGKATLTADKSSSTAYMQLSSLTSENSAVYFCAREAASNAMDYWGQGTSVTVSSASTKGPSVFPLAPCSRSTSESTAALGCLVKDYFPEPVTVSWNSGALTSGVHTFPAVLQSSGLYSLSSVVTVPSSSLGTKTYTCNVDHKPSNTKVDKRVESKYGPPCPPCPAPEFLGGPSVFLFPPKPKDTLMISRTPEVTCVVVDVSQEDPEVQFNWYVDGVEVHNAKTKPREEQFNSTYRVVSVLTVLHQDWLNGKEYKCKVSNKGLPSSIEKTISKAKGQPREPQVYTLPPSQEEMTKNQVSLTCLVKGFYPSDIAVEWESNGQPENNYKTTPPVLDSDGSFFLYSRLTVDKSRWQEGNVFSCSVMHEALHNHYTQKSLSLSLG

SEQ ID NO: 492 - protein, 448 aa, synthetic construct
  REGION 1..448: note = 846.4D5 heavy chain peptide sequence
EVKLEESGGGLVQPGGSMKLSCVASGFTFSNYWMNWVRQSPEKGLEWVAEIRLKSNNYATHYAESVKGRFTISRDDSKSSVYLQMNNLRAEDTGIYYCTRHYGFPYWYFDVWGAGTTVTVSSASTKGPSVFPLAPCSRSTSESTAALGCLVKDYFPEPVTVSWNSGALTSGVHTFPAVLQSSGLYSLSSVVTVPSSSLGTKTYTCNVDHKPSNTKVDKRVESKYGPPCPPCPAPEFLGGPSVFLFPPKPKDTLMISRTPEVTCVVVDVSQEDPEVQFNWYVDGVEVHNAKTKPREEQFNSTYRVVSVLTVLHQDWLNGKEYKCKVSNKGLPSSIEKTISKAKGQPREPQVYTLPPSQEEMTKNQVSLTCLVKGFYPSDIAVEWESNGQPENNYKTTPPVLDSDGSFFLYSRLTVDKSRWQEGNVFSCSVMHEALHNHYTQKSLSLSLG

SEQ ID NO: 493 - protein, 444 aa, synthetic construct
  REGION 1..444: note = 846T.1H2 heavy chain peptide sequence
QIQLVQSGPELKKPGETVKISCKASGYTFTNYGMNWVKQAPGKGLKWMGWINTNTGEPTYAEEFKGRFAFSLETSASTAYLQINNLKNEDTATYFCATGGGNWDFDYWGQGTTLTVSSASTKGPSVFPLAPCSRSTSESTAALGCLVKDYFPEPVTVSWNSGALTSGVHTFPAVLQSSGLYSLSSVVTVPSSSLGTKTYTCNVDHKPSNTKVDKRVESKYGPPCPPCPAPEFLGGPSVFLFPPKPKDTLMISRTPEVTCVVVDVSQEDPEVQFNWYVDGVEVHNAKTKPREEQFNSTYRVVSVLTVLHQDWLNGKEYKCKVSNKGLPSSIEKTISKAKGQPREPQVYTLPPSQEEMTKNQVSLTCLVKGFYPSDIAVEWESNGQPENNYKTTPPVLDSDGSFFLYSRLTVDKSRWQEGNVFSCSVMHEALHNHYTQKSLSLSLG

SEQ ID NO: 494 - protein, 440 aa, synthetic construct
  REGION 1..440: note = 847.14H4 heavy chain peptide sequence
QIQLVQSGPELTKPGETVKISCKASGYTFTDYGMNWVRQAPGETLKWMGWINTYTGEPTYADDFKGRFAFSLESSASTAYLQINNLKNEDVATYFCARYPMDYWGQGTSVTVSSASTKGPSVFPLAPCSRSTSESTAALGCLVKDYFPEPVTVSWNSGALTSGVHTFPAVLQSSGLYSLSSVVTVPSSSLGTKTYTCNVDHKPSNTKVDKRVESKYGPPCPPCPAPEFLGGPSVFLFPPKPKDTLMISRTPEVTCVVVDVSQEDPEVQFNWYVDGVEVHNAKTKPREEQFNSTYRVVSVLTVLHQDWLNGKEYKCKVSNKGLPSSIEKTISKAKGQPREPQVYTLPPSQEEMTKNQVSLTCLVKGFYPSDIAVEWESNGQPENNYKTTPPVLDSDGSFFLYSRLTVDKSRWQEGNVFSCSVMHEALHNHYTQKSLSLSLG

SEQ ID NO: 495 - protein, 219 aa, synthetic construct
  REGION 1..219: note = TB001 light chain peptide sequence
DIVLTQSPLSLPVTPGEPASISCRSSKSLLYKDGKTYLNWFLQKPGQSPQLLIYLMSTHASGVPDRFSGSGSGTDFTLKISRVEAEDVGVYYCQQLVDYPLTFGGGTKLEIKRTVAAPSVFIFPPSDEQLKSGTASVVCLLNNFYPREAKVQWKVDNALQSGNSQESVTEQDSKDSTYSLSSTLTLSKADYEKHKVYACEVTHQGLSSPVTKSFNRGEC

SEQ ID NO: 496 - protein, 219 aa, synthetic construct
  REGION 1..219: note = TB006 light chain peptide sequence
DIVMTQTPLSLSVTPGQPASISCKSSKSLLHSDGITYLYWYLQKPGQSPQLLIYRMSNLASGVPDRFSGSGSGTDFTLKISRVEAEDVGVYYCAQMLEFPLTFGQGTKLEIKRTVAAPSVFIFPPSDEQLKSGTASVVCLLNNFYPREAKVQWKVDNALQSGNSQESVTEQDSKDSTYSLSSTLTLSKADYEKHKVYACEVTHQGLSSPVTKSFNRGEC

SEQ ID NO: 497 - protein, 214 aa, synthetic construct
  REGION 1..214: note = 12G5.D7 light chain peptide sequence
DILMTQSPSSMSVSLGDTVSITCHASQGINSNMGWLQQKPGKSFKGLIYHATNLEDGVPSRFSGSGSGADYSLTISSLESEDFADYYCVQYAQFPPTFGSGTKLEIKRADVAPTVSIFPPSSEQLTSGGASVVCFLNNFYPKDINVKWKIDGSERQNGVLNSWTDQDSKDSTYSMSSTLTLTKDEYERHNSYTCEATHKTSTSPIVKSFNRNEC

SEQ ID NO: 498 - protein, 219 aa, synthetic construct
  REGION 1..219: note = 13A12.2E5 light chain peptide sequence
DVVMTQTPLTLSVAIGQPASISCKSSQSLLYTNGKTYLNWLLQRPGQSPKRLIYLLSKLDSGVPDRFSASGSGTDFTLKISRVEAEDLGVYYCLQSTHFPLTFGAGTKLEMKRADVAPTVSIFPPSSEQLTSGGASVVCFLNNFYPKDINVKWKIDGSERQNGVLNSWTDQDSKDSTYSMSSTLTLTKDEYERHNSYTCEATHKTSTSPIVKSFNRNEC

SEQ ID NO: 499 - protein, 219 aa, synthetic construct
  REGION 1..219: note = 14H10.2C9 light chain peptide sequence
DVVMTQTPLTLSVTIGQPASISCKSSQSLFDSDGKTYLNWLLQRPGQSPKRLIYLVSKLDSGVPDRFTGSGSGTDFTLKISRVEAEDLGVYYCWQGTHFPLTFGAGTKLEMKRADVAPTVSIFPPSSEQLTSGGASVVCFLNNFYPKDINVKWKIDGSERQNGVLNSWTDQDSKDSTYSMSSTLTLTKDEYERHNSYTCEATHKTSTSPIVKSFNRNEC

SEQ ID NO: 500 - protein, 219 aa, synthetic construct
  REGION 1..219: note = 15F10.2D6 light chain peptide sequence
DVLMTQTPLSLPVSLGDQASISCRSSQSIVHNNGNTYLEWYLQKPGQSPKLLIYKVSNRFSGVPDRFSGSGSGTDFTLKISRVEAEDLGVYYCFQGSHVPLTFGGGTKLELKRADVAPTVSIFPPSSEQLTSGGASVVCFLNNFYPKDINVKWKIDGSERQNGVLNSWTDQDSKDSTYSMSSTLTLTKDEYERHNSYTCEATHKTSTSPIVKSFNRNEC

SEQ ID NO: 501 - protein, 214 aa, synthetic construct
  REGION 1..214: note = 19B5.2E6/23H9.2E4 light chain peptide sequence
DIQMTQTTSSLSASLGDRVTISCSASQGINNYLNWYQQKPDGTVKLLIYYASSLHSGVPSRFSGSGSGTDYSLTISNLEPEDIATYYCQQYSQVPYTFGSGTKLEIKRADVAPTVSIFPPSSEQLTSGGASVVCFLNNFYPKDINVKWKIDGSERQNGVLNSWTDQDSKDSTYSMSSTLTLTKDEYERHNSYTCEATHKTSTSPIVKSFNRNEC

SEQ ID NO: 502 - protein, 214 aa, synthetic construct
  REGION 1..214: note = 20D11.2C6 light chain peptide sequence
DIQMNQSPSSLSASLGDTITITCRASQNIYIWLSWYQQKPGNIPKLLIYKASNLHTGVPSRFSGSGSGTDFTLTISTLQPEDIATYFCLQGQSYPLTFGAGTKLEMKRADVAPTVSIFPPSSEQLTSGGASVVCFLNNFYPKDINVKWKIDGSERQNGVLNSWTDQDSKDSTYSMSSTLTLTKDEYERHNSYTCEATHKTSTSPIVKSFNRNEC

SEQ ID NO: 503 - protein, 214 aa, synthetic construct
  REGION 1..214: note = 20H5.A3 light chain peptide sequence
DIQMTQTTSSLSASLGDRVTINCSASQDISNYLNWYQQKPDGTVKLLIYYTSSLLSGVPSRFSGSGSGTDYSLTISNLEPEDIATYFCQQYSKLPYTFGSGTHLEIKRADVAPTVSIFPPSSEQLTSGGASVVCFLNNFYPKDINVKWKIDGSERQNGVLNSWTDQDSKDSTYSMSSTLTLTKDEYERHNSYTCEATHKTSTSPIVKSFNRNEC

SEQ ID NO: 504 - protein, 219 aa, synthetic construct
  REGION 1..219: note = 2D10.2B2 light chain peptide sequence
DIVMTQAAFSNPVTLGTSASISCRSSKSLLHSDGITYLYWYLQRPGQSPQLLIYRMSNLASGVPDRFSGSGSGTDFTLRISRVEAEDVGVYYCAQMIEFPLTFGAGTILELKRADVAPTVSIFPPSSEQLTSGGASVVCFLNNFYPKDINVKWKIDGSERQNGVLNSWTDQDSKDSTYSMSSTLTLTKDEYERHNSYTCEATHKTSTSPIVKSFNRNEC

SEQ ID NO: 505 - protein, 219 aa, synthetic construct
  REGION 1..219: note = 3B11.2G2 light chain peptide sequence
DVVMTQTPLTLSVAIGQPASISCKSSQSLLYTNGKTYLNWLLQRPGQSPKRLIYLVSKLDSGVPDRFSGSGSGTDFTLKISRVEAEDLGVYYCLQSTHFPLTFGAGTKLELKRADVAPTVSIFPPSSEQLTSGGASVVCFLNNFYPKDINVKWKIDGSERQNGVLNSWTDQDSKDSTYSMSSTLTLTKDEYERHNSYTCEATHKTSTSPIVKSFNRNEC

SEQ ID NO: 506 - protein, 219 aa, synthetic construct
  REGION 1..219: note = 7D8.2D8 light chain peptide sequence
DVLMTQTPLSLPVSLGDQASISCRSSQSIVHSNGNTYLEWYLQKPGQSPKLLIYKVSNRFSGVPDRFSGSGSGTDFTLKISRVEAEDLGVYYCFQGSHVPLTFGAGTKLELKRADVAPTVSIFPPSSEQLTSGGASVVCFLNNFYPKDINVKWKIDGSERQNGVLNSWTDQDSKDSTYSMSSTLTLTKDEYERHNSYTCEATHKTSTSPIVKSFNRNEC

SEQ ID NO: 507 - protein, 219 aa, synthetic construct
  REGION 1..219: note = mTB001 light chain peptide sequence
DIVITQDELSNPVTSGESVSISCRSSKSLLYKDGKTYLNWFLQRPGQSPQLLIYLMSTHASGVSDRFSGSGSGTDFTLEISRVKAEDVGVYYCQQLVDYPLTFGAGTKLELKRADVAPTVSIFPPSSEQLTSGGASVVCFLNNFYPKDINVKWKIDGSERQNGVLNSWTDQDSKDSTYSMSSTLTLTKDEYERHNSYTCEATHKTSTSPIVKSFNRNEC

SEQ ID NO: 508 - protein, 219 aa, synthetic construct
  REGION 1..219: note = 4A11.2B5 light chain peptide sequence
DIVMTQAAFSNPVTLGTSASISCRSSKSLLHSDGITYLYWYLQRPGQSPQLLIYRMSNLASGVPDRFSGSGSGTDFTLRISRVEAEDVGVYYCAQMLEFPLTFGAGTKLELKRTVAAPSVFIFPPSDEQLKSGTASVVCLLNNFYPREAKVQWKVDNALQSGNSQESVTEQDSKDSTYSLSSTLTLSKADYEKHKVYACEVTHQGLSSPVTKSFNRGEC

SEQ ID NO: 509 - protein, 219 aa, synthetic construct; identical to SEQ ID NO: 496
  REGION 1..219: note = 4A11.H1L1 light chain peptide sequence

SEQ ID NO: 510 - protein, 219 aa, synthetic construct
  REGION 1..219: note = 4A11.H4L2 light chain peptide sequence
DIVMTQSPLSLPVTPGEPASISCRSSKSLLHSDGITYLYWYLQKPGQSPQLLIYRMSNLASGVPDRFSGSGSGTDFTLKISRVEAEDVGVYYCAQMLEFPLTFGQGTKLEIKRTVAAPSVFIFPPSDEQLKSGTASVVCLLNNFYPREAKVQWKVDNALQSGNSQESVTEQDSKDSTYSLSSTLTLSKADYEKHKVYACEVTHQGLSSPVTKSFNRGEC

SEQ ID NO: 511 - protein, 219 aa, synthetic construct
  REGION 1..219: note = 4G2.2G6 light chain peptide sequence
DVVMTQTPLTLSVTIGQPASISCKSSQSLLYTDGKTYLSWFLQRPGQSPKRLIYLVSKLDSGVPDRFSGSGSGTDFTLKISRVEAEDLGVYYCLQSTHFPLTFGAGTKLEVKRTVAAPSVFIFPPSDEQLKSGTASVVCLLNNFYPREAKVQWKVDNALQSGNSQESVTEQDSKDSTYSLSSTLTLSKADYEKHKVYACEVTHQGLSSPVTKSFNRGEC

SEQ ID NO: 512 - protein, 214 aa, synthetic construct
  REGION 1..214: note = 6B3.2D3 light chain peptide sequence
SIVMTQTPKFLLVSAGDRVTITCKASQSVSNDVAWYQQKPGQSPKLLIYYASNRYTGVPDRFTGSGYGTDFTFTISTVQAEDLAVYFCQQDYTSPYTFGGGTKLEIKRTVAAPSVFIFPPSDEQLKSGTASVVCLLNNFYPREAKVQWKVDNALQSGNSQESVTEQDSKDSTYSLSSTLTLSKADYEKHKVYACEVTHQGLSSPVTKSFNRGEC

SEQ ID NO: 513 - protein, 214 aa, synthetic construct
  REGION 1..214: note = 6H6.2D6 light chain peptide sequence
DIQMTQTTSSLSASLGDRVTISCSASQGISNYLNWYQQKPDGTVKLLIYYTSSLHSGVPSRFSGSGSGTDYSLTISNLEPEDIATYYCQQYSELPYTFGSGTKLEIKRTVAAPSVFIFPPSDEQLKSGTASVVCLLNNFYPREAKVQWKVDNALQSGNSQESVTEQDSKDSTYSLSSTLTLSKADYEKHKVYACEVTHQGLSSPVTKSFNRGEC

SEQ ID NO: 514 - protein, 214 aa, synthetic construct
  REGION 1..214: note = 9H2.2H10 light chain peptide sequence
DIVMTQSHKFMSTSVGDRVSITCKASQDVSTAVAWYQQKPGQSPKLLIYWASTRHTGVPDRFTGSGSGTDYTLTISSVQAEDLALYYCQQHYTTPLTFGAGTKLELKRTVAAPSVFIFPPSDEQLKSGTASVVCLLNNFYPREAKVQWKVDNALQSGNSQESVTEQDSKDSTYSLSSTLTLSKADYEKHKVYACEVTHQGLSSPVTKSFNRGEC

SEQ ID NO: 515 - protein, 214 aa, synthetic construct
  REGION 1..214: note = 13G4.2F8 light chain peptide sequence
DIVMTQSQKFMSTSVGERVSITCKASQNVGTNVAWYQQKAGQSLELLIYGASNRHTGVPDRFTGSGSGTDFTLTITNVQSEDMTNYFCEQYSNFPLTFGAGTKLELKRTVAAPSVFIFPPSDEQLKSGTASVVCLLNNFYPREAKVQWKVDNALQSGNSQESVTEQDSKDSTYSLSSTLTLSKADYEKHKVYACEVTHQGLSSPVTKSFNRGEC

SEQ ID NO: 516 - protein, 219 aa, synthetic construct
  REGION 1..219: note = 13H12.2F8 light chain peptide sequence
DVVMTQTPLTLSVTIGQPASISCKSSQSLFHSDGKTYLNWLLQRPGQSPKRLIYLVSKLDSGVPDRFTGSGSGTDFTPKISRVEDEDLGVYYCWQGTHFPLTFGAGTKLEMKRTVAAPSVFIFPPSDEQLKSGTASVVCLLNNFYPREAKVQWKVDNALQSGNSQESVTEQDSKDSTYSLSSTLTLSKADYEKHKVYACEVTHQGLSSPVTKSFNRGEC

SEQ ID NO: 517 - protein, 214 aa, synthetic construct
  REGION 1..214: note = 15G7.2A7 light chain peptide sequence
DIQMNQSPSSLSASLGDTISITCRASQNINIWLSWYQQKPGNIPQLLIYKASNLHTGVPSRFSGSGSGTDFTLTISSLQPEDIATYYCLQGQSYPLTFGAGTKLVMKRTVAAPSVFIFPPSDEQLKSGTASVVCLLNNFYPREAKVQWKVDNALQSGNSQESVTEQDSKDSTYSLSSTLTLSKADYEKHKVYACEVTHQGLSSPVTKSFNRGEC

SEQ ID NO: 518 - protein, 217 aa, synthetic construct
  REGION 1..217: note = 19D9.2E5 light chain peptide sequence
DVVMTQTPLTLSVTIGQPASISCKSSQSLLHSDGKTYLNWLLQRPGQPPKRLMYLVSTLDSGVPDRFTGSGSGTDFTLKISRVEAEDLGVYYCWQGTHFPLTFGAGTKPERTVAAPSVFIFPPSDEQLKSGTASVVCLLNNFYPREAKVQWKVDNALQSGNSQESVTEQDSKDSTYSLSSTLTLSKADYEKHKVYACEVTHQGLSSPVTKSFNRGEC

SEQ ID NO: 519 - protein, 217 aa, synthetic construct
  REGION 1..217: note = 23B10.2B12 light chain peptide sequence
DIVMTQAAFSNPVTLGTSASISCRSSKSLLHSDGITYFYWYLQRPGQSPQLLIYRMSNLASGVPDRFSGSGSGTDFTLRISRVEAEDVGVYYCAQMLEFPLTFGAGTKLERTVAAPSVFIFPPSDEQLKSGTASVVCLLNNFYPREAKVQWKVDNALQSGNSQESVTEQDSKDSTYSLSSTLTLSKADYEKHKVYACEVTHQGLSSPVTKSFNRGEC

SEQ ID NO: 520 - protein, 214 aa, synthetic construct
  REGION 1..214: note = 24D12.2H9 light chain peptide sequence
DIVMTQSHKFMSTSVGDRVSITCKASQDVRTAVAWYQQKPGQSPKLLIYWASTRHTGVPDRFTGSGSGTDFTLTLSNVQSEDLADYFCQQYSSYPWTFGGGTKLEIKRTVAAPSVFIFPPSDEQLKSGTASVVCLLNNFYPREAKVQWKVDNALQSGNSQESVTEQDSKDSTYSLSSTLTLSKADYEKHKVYACEVTHQGLSSPVTKSFNRGEC

SEQ ID NO: 521 - protein, 219 aa, synthetic construct
  REGION 1..219: note = F846C.1B2 light chain peptide sequence
NIWLTQSPSSLAVSAGEMVTMTCKSSQSVLYSSNQKNYLAWYQQKPGQSPKLLIYWASTRESGVPDRFTGSGSGTDFSLTISSVQAEDLAVYYCHQYLSSLTFGAGTKLELKRTVAAPSVFIFPPSDEQLKSGTASVVCLLNNFYPREAKVQWKVDNALQSGNSQESVTEQDSKDSTYSLSSTLTLSKADYEKHKVYACEVTHQGLSSPVTKSFNRGEC

SEQ ID NO: 522 - protein, 219 aa, synthetic construct
  REGION 1..219: note = F846C.1F5/F846C.2H3 light chain peptide sequence
NIMMTQSPSSLAVSAGEKVTMSCKSSQSVLYSSNQKNYLAWYQQKPGQSPKLLIYWASTRESGVPDRFTGSGSGTDFTLTISSVQPEDLAVYYCHQYLSSLTFGAGTKLELKRTVAAPSVFIFPPSDEQLKSGTASVVCLLNNFYPREAKVQWKVDNALQSGNSQESVTEQDSKDSTYSLSSTLTLSKADYEKHKVYACEVTHQGLSSPVTKSFNRGEC

SEQ ID NO: 523 - protein, 219 aa, synthetic construct
  REGION 1..219: note = F846C.1H12 light chain peptide sequence
NIMMTQSPSSLAVSAGQKVTMSCKSSQSVLYSSSQKNYLAWYQQKPGQSPKLLIYWASTRESGVPDRFSGSGSGTDFTLTISSVQPEDLAVYYCHQYLSSLTFGAGTKLELKRTVAAPSVFIFPPSDEQLKSGTASVVCLLNNFYPREAKVQWKVDNALQSGNSQESVTEQDSKDSTYSLSSTLTLSKADYEKHKVYACEVTHQGLSSPVTKSFNRGEC

SEQ ID NO: 524 - protein, 219 aa, synthetic construct
  REGION 1..219: note = F846C.1H5 light chain peptide sequence
DVVMTQTPLSLPVSLGDQASISCRSSQSLVHNSGNTYLHWYLQRPGQSPNLLIYKVSNRFSGVPDRFSGSGSGTDFTLKISRVAAEDLGVYFCSQSTHVPPTFGGGTKLEIKRTVAAPSVFIFPPSDEQLKSGTASVVCLLNNFYPREAKVQWKVDNALQSGNSQESVTEQDSKDSTYSLSSTLTLSKADYEKHKVYACEVTHQGLSSPVTKSFNRGEC

SEQ ID NO: 525 - protein, 216 aa, synthetic construct
  REGION 1..216: note = F846TC.14A2 light chain peptide sequence
QAVVTQESALTTSPGETVTLTCRSSTGAVTTSNYANWVQEKPDHLFTGLIGGINNRVPGVPARFSGSLIGDKAALTITGAQTEDEAIYFCALWYSNHWVFGGGTKLTVLRTVAAPSVFIFPPSDEQLKSGTASVVCLLNNFYPREAKVQWKVDNALQSGNSQESVTEQDSKDSTYSLSSTLTLSKADYEKHKVYACEVTHQGLSSPVTKSFNRGEC

SEQ ID NO: 526 - protein, 219 aa, synthetic construct
  REGION 1..219: note = F846TC.14E4 light chain peptide sequence
DIVMTQAAFSNPVTLGTSASISCRSSKSLLHTNGITFLYWYLQKPGQSPQPLIYQMSNLASGVPDRFSSSGSGTDFTLRISRVEAEDVGVYYCAQNLELPWTFGGGTKLEINRTVAAPSVFIFPPSDEQLKSGTASVVCLLNNFYPREAKVQWKVDNALQSGNSQESVTEQDSKDSTYSLSSTLTLSKADYEKHKVYACEVTHQGLSSPVTKSFNRGEC

SEQ ID NO: 527 - protein, 219 aa, synthetic construct
  REGION 1..219: note = F846TC.16B5 light chain peptide sequence
NIMMTQSPSSLAVSAGEKVTMSCKSSQSVLYSSNQKNYLAWYQQKPGQSPKLLIYWASTRESGVPDRFTGSGSGTDFTLTISSVQAEDLAVYYCHQYLSSLTFGAGTKLELKRTVAAPSVFIFPPSDEQLKSGTASVVCLLNNFYPREAKVQWKVDNALQSGNSQESVTEQDSKDSTYSLSSTLTLSKADYEKHKVYACEVTHQGLSSPVTKSFNRGEC

SEQ ID NO: 528 - protein, 220 aa, synthetic construct
  REGION 1..220: note = F846TC.7F10 light chain peptide sequence
DIVMTQSPSSLAMSVGQKVTMSCKSSQSLLNSSNQKNYLAWYQQKPGQSPKLLVYFASTRESGVPDRFIGSGSGTDFTLTISSVQAEDLADYFCQQHYSTPYTFGGGAKLEIKRTVAAPSVFIFPPSDEQLKSGTASVVCLLNNFYPREAKVQWKVDNALQSGNSQESVTEQDSKDSTYSLSSTLTLSKADYEKHKVYACEVTHQGLSSPVTKSFNRGEC

SEQ ID NO: 529 - protein, 214 aa, synthetic construct
  REGION 1..214: note = F847C.10B9 light chain peptide sequence
DIRMTQSPSSLSASLGDTITITCHASQNINVWLSWYQQKPGNIPKLLIYKASNLHTGVPSRFSGSGSGTGFTLTISSLQPEDIATYYCQQGQSYPYTFGGGTKLELKRTVAAPSVFIFPPSDEQLKSGTASVVCLLNNFYPREAKVQWKVDNALQSGNSQESVTEQDSKDSTYSLSSTLTLSKADYEKHKVYACEVTHQGLSSPVTKSFNRGEC

SEQ ID NO: 530 - protein, 214 aa, synthetic construct
  REGION 1..214: note = F847C.11B1 light chain peptide sequence
EIVLTQSPASLSVTTGEKVTIRCITSIDIDDDMNWYQQKPGEPPKLLISEGNTLRPGVPSRFSSSGYGTDFVFTIENTLSEDVADYYCLQSDNKPLTFGAGTKLELKRTVAAPSVFIFPPSDEQLKSGTASVVCLLNNFYPREAKVQWKVDNALQSGNSQESVTEQDSKDSTYSLSSTLTLSKADYEKHKVYACEVTHQGLSSPVTKSFNRGEC

SEQ ID NO: 531 - protein, 214 aa, synthetic construct
  REGION 1..214: note = F847C.12F12 light chain peptide sequence
DIQVIQSPSSLSASLGDTITITCHASQNINVWLSWYQQKPGNIPKLLIYKASNLHTGVPSRFSGSGSGTGFTLTISSLQPEDIATYYCQQGQSYPYTFGGGTKLELKRTVAAPSVFIFPPSDEQLKSGTASVVCLLNNFYPREAKVQWKVDNALQSGNSQESVTEQDSKDSTYSLSSTLTLSKADYEKHKVYACEVTHQGLSSPVTKSFNRGEC

SEQ ID NO: 532 - protein, 214 aa, synthetic construct
  REGION 1..214: note = F847C.26F5 light chain peptide sequence
EIKMNQSPSSLSASLGDTITITCHASQNINVWLSWYQQKPGNIPKLLIYKASNLHTGVPSRFSGSGSGTGFTLTISSLQPEDIATYYCQQGQSYPYTFGGGTKLELKRTVAAPSVFIFPPSDEQLKSGTASVVCLLNNFYPREAKVQWKVDNALQSGNSQESVTEQDSKDSTYSLSSTLTLSKADYEKHKVYACEVTHQGLSSPVTKSFNRGEC

SEQ ID NO: 533 - protein, 216 aa, synthetic construct
  REGION 1..216: note = F847C.4B10/847.14H4 light chain peptide sequence
QAVVTQESALTTSPGETVTLTCRSSTGAVTTSNYANWVQEKPDHLFTGLIGGTNNRAPGVPARFSGSLIGDKAALTITGAQTEDEAIYFCALWYSNHLVFGGGTKLTVLRTVAAPSVFIFPPSDEQLKSGTASVVCLLNNFYPREAKVQWKVDNALQSGNSQESVTEQDSKDSTYSLSSTLTLSKADYEKHKVYACEVTHQGLSSPVTKSFNRGEC

SEQ ID NO: 534 - protein, 219 aa, synthetic construct
  REGION 1..219: note = F849C.8D10 light chain peptide sequence
DVLMTQTPLSLPVSLGDQASISCRSSQDIVHSSGNTYLEWYLQKPGQSLKLLIYKVSNRFSGVPDRFSASGSGTDFTLKISRVEAEDLGVYYCFQGSHVPPTFGSGTKLEIKRTVAAPSVFIFPPSDEQLKSGTASVVCLLNNFYPREAKVQWKVDNALQSGNSQESVTEQDSKDSTYSLSSTLTLSKADYEKHKVYACEVTHQGLSSPVTKSFNRGEC

SEQ ID NO: 535 - protein, 219 aa, synthetic construct
  REGION 1..219: note = F849C.8H3 light chain peptide sequence
DIGMRQAAFSNPVTLGTSASISCRSSKSLLYSNGITYLYWFLQKPGQSPQLLIYQMSNLASGVPDRFSSSGSGTDFTLRISRVEADDVGVYYCAQNLELPWTFGGGTKLEIKRTVAAPSVFIFPPSDEQLKSGTASVVCLLNNFYPREAKVQWKVDNALQSGNSQESVTEQDSKDSTYSLSSTLTLSKADYEKHKVYACEVTHQGLSSPVTKSFNRGEC

SEQ ID NO: 536 - protein, 218 aa, synthetic construct
  REGION 1..218: note = 846.2B11 light chain peptide sequence
DIVLTQSPASLGVSLGQRATISCRASKSVSTSGYSYMHWYQQKPGQPPKLLIYLASILESGVPARFSGSGSGTDFTLNIHPVEEEDAAIYYCQHSRELPLTFGAGTKLELKRTVAAPSVFIFPPSDEQLKSGTASVVCLLNNFYPREAKVQWKVDNALQSGNSQESVTEQDSKDSTYSLSSTLTLSKADYEKHKVYACEVTHQGLSSPVTKSFNRGEC

SEQ ID NO: 537 - protein, 218 aa, synthetic construct
  REGION 1..218: note = 846.4D5 light chain peptide sequence
NIVLTQSPASLAVSLGQRATISCRASESVDSYGNSFMHWYQQKPGQPPKLLIYLASNLESGVPARFSGSGSRTDFTLTIDPVEADDAATYYCQQNNEDPWTFGGGTKLEIKRTVAAPSVFIFPPSDEQLKSGTASVVCLLNNFYPREAKVQWKVDNALQSGNSQESVTEQDSKDSTYSLSSTLTLSKADYEKHKVYACEVTHQGLSSPVTKSFNRGEC

SEQ ID NO: 538 - protein, 219 aa, synthetic construct
  REGION 1..219: note = 846T.1H2 light chain peptide sequence
DVVMTQTPLTLSVTIGQPASISCKSSQSLLYSNGKTYLNWLLQRPGQSPKRLIYLVSKLDSGVPDRFTGSGSGTDFTLKISRVEAEDLGVYYCVQGTHFPQTFGGGTKLEIKRTVAAPSVFIFPPSDEQLKSGTASVVCLLNNFYPREAKVQWKVDNALQSGNSQESVTEQDSKDSTYSLSSTLTLSKADYEKHKVYACEVTHQGLSSPVTKSFNRGEC

SEQ ID NO: 539 - DNA, 348 bp, synthetic construct
  misc_feature 1..348: note = TB001 VH DNA sequence
  source 1..348: mol_type = other DNA
caggtgcagctggtgcagtccggctccgagctgaaaaaacccggcgcctccgtgaaagtgtcctgcaaagcctccggctacacattcacaaactacggcatgaactgggtgaggcaggcccccggccagggcctgaaatggatgggctggatcaacacaaacacaggcgagcccacatacgtggaggagttcacaggcaggttcgtgttctccctggagacatccgtgtccacagcctacctgcagatctcctccctgaaagccgaggacacagccgtgtacttctgcgccccctacgacaacttcttcgcctactggggccagggcacaacagtgacagtgtcctcc

SEQ ID NO: 540 - DNA, 357 bp, synthetic construct
  misc_feature 1..357: note = TB006VH DNA sequence
  source 1..357: mol_type = other DNA
cagattcaattggttcagagcggctcagaactgaaaaagcctggagccagcgttaaagtgagctgtaaagccagtggatacacattcaccacttacgtcatgtcctgggttagacaggcccctggacaggggctggaatggatgggctggataaacactcactctggagtgcccacatacgccgacgactttacaggcaggttcgtgttttccctagatactagtgtgaatactgcatacttgcaaatctcttctctgaaagcagaggataccgccgtgtacttttgcacccgcgatgggaatgatggggatgccatggacaactggggccaggggacgactgtgacagtgtcttca

SEQ ID NO: 541 - DNA, 366 bp, synthetic construct
  misc_feature 1..366: note = 12G5.D7 VH DNA sequence
  source 1..366: mol_type = other DNA
caggtgcagctgaagcagtctggggctgagctggtgaggcctggggcttcagtgaagctgtcctgcaaggcttctggctacactttcactgactactatataaactgggtgaagcagaggcctggacagggacttgagtggattgcaaggatttatcctggaactggtaatactgactacaatgagaagttcaagggcagggccacactgactgcagaaaactcctccagcactgcctacatgcagctcagcagtctgacatctgaggactctgctgtctatttctgtgcaagatttgcgtattactacggtagtggagggtactttgactactggggccacggcaccactctcacagtctcctca

SEQ ID NO: 542 - DNA, 357 bp, synthetic construct
  misc_feature 1..357: note = 13A12.2E5 VH DNA sequence
  source 1..357: mol_type = other DNA
cagatccagttggtacagtctggacctgagctgaagaagcctggagagacagtcaagatctcctgcaagacttctgggtataaattcaaaacctatgtgatgagctgggtgaaacaggctccaggaaaggctttaaagtggatgggctggataaacacctactctggagtgccaacatatgctgatgacttcaagggacgatttgccttctctttggaaacctctgccagcactgcctatttggagatcatcaacctcaaaaatgaggacacggctacatatttctgtgcaagagatggtaactacggggatcctatggactactggggtcaaggaacctcagtcaccgtctcctca

SEQ ID NO: 543 - DNA, 351 bp, synthetic construct
  misc_feature 1..351: note = 14H10.2C9 VH DNA sequence
  source 1..351: mol_type = other DNA
cagatccagttggtacagtctggacctgagctgaagaagcctggagagacagtcaagatctcctgcaaggcttctgggtataccttcacaacctatggaatgggctgggtgaaacaggctccaggaaaggatttaaagtggatgggctggataaacacctactctggagtgccaacatatgctgatgacttcaagggacggtttgccttctctttggaaacctctgccagcactgcctatttgcagatcagcaacctcaaaaatgaagacacggctacatatttctgttcaaccccttatgaatacgacggggcttactggggccaggggactctggtcactgtctctgca

SEQ ID NO: 544 - DNA, 339 bp, synthetic construct
  misc_feature 1..339: note = 15F10.2D6 VH DNA sequence
  source 1..339: mol_type = other DNA
gaagtacagctggtggagtctgggggaggcttagtgaagcctggagggtccctgaaactctcctgtgcagcctctggattcgctttcagttcctatgccatgtcttgggttcgccagactccggaaaagaggctggagtgggtcgcaaccattagtgatggtggtgtttacacctactatacagaccatgtaaagggccgattcaccatctccagagacaatgccgaggacaacctgtacctgcaaatgagccatctgaagtctgaggacacagccatgtattattgtgtgagagatgggggctactggggccaaggcaccactctcacagtctcctca

SEQ ID NO: 545 - DNA, 348 bp, synthetic construct
  misc_feature 1..348: note = 19B5.2E6 VH DNA sequence
  source 1..348: mol_type = other DNA
cagatccaacttgttcagagcgggcctgaattgaagaaaccaggcgagactgtaaagatctcctgtaaggccagtggctatacattcaccacctacgcaatgagctgggtcaagcaggcacccggaaagggtctgaagtggatgggttggataaatacatactcaggcgtcccaacctacgctgatgatttgaaggggcgctttgccttttctcttgaaacctcagcatcaaccgcctacttgcagataaataacctcaaaaatgaagacaccgctacctatttctgcgcaagggggccttatgctatggactactggggccagggcacctctgtgactgtaagttct

SEQ ID NO: 546 - DNA, 345 bp, synthetic construct
  misc_feature 1..345: note = 20D11.2C6 VH DNA sequence
  source 1..345: mol_type = other DNA
gaggtccagctgcaacaatctggacctgaactggtgaagcctggggcttcagtgaagatatcctgtaaggcttctggatacacgttcactgacttctacataaactgggtgaagcagagccatggaaagagccttgagtggattggagatattaatcctaagaatggtggtattaactacaacccgaagttcaagatcaaggccacattgactgtagacaagtcctccagcacatcctacatggacctccgcggcctgacatctgaggactctgcagtctattactgcacctcaggctacggatttccttactggggccaagggactctggtcactgtctctgca

SEQ ID NO: 547 - DNA, 348 bp, synthetic construct
  misc_feature 1..348: note = 20H5.A3 VH DNA sequence
  source 1..348: mol_type = other DNA
cagatccagttggtacagtctggacctgagctgaagaagcctggagagtcagtcaagatctcctgcaaggcttctggttatgccttcacaacctatggaatgagctgggtgcaacaggctccaggaaagggtttaaagtggatgggctgggtaaacacctactctggagtgccaacatgtgctgatgacttcaagggacggtttgccttctctttggaaacctctgccagcactgcctatttgcagatcaacaacctcagaaatgaggacacggctacatatttctgtgcaagagggccctatgctatggactactggggtcaaggaacctcagtcaccgtctcctca

SEQ ID NO: 548 - DNA, 348 bp, synthetic construct
  misc_feature 1..348: note = 23H9.2E4 VH DNA sequence
  source 1..348: mol_type = other DNA
cagatccagttggtacagtctggacctgagctgaagaagcctggagagacagtcaagatctcctgcaaggcttctgggtataccttcacaacctatgcaatgagctgggtgaaacaggctccaggaaagggtttaaagtggatgggctggataaacacctactctggagtgccaacatatgctgatgacctcaagggacggtttgccttctctttggaaacctctgccagcactgcctatttgcagatcaacaacctcaaaaatgaggacacggctacatatttctgtgcaagagggccctatgctatggactactggggtcaaggaacctcagtcaccgtctcctca

SEQ ID NO: 549 - DNA, 360 bp, synthetic construct
  misc_feature 1..360: note = 2D10-VH0-VL0 VH DNA sequence
  source 1..360: mol_type = other DNA
caagtacagctccagcaatcaggacctgaacttgttaagccaggtgcaagcgtcaaaataagttgtaaagcatcaggttacacctttacagactactatatcaactgggtcaagcaacggcctggtcagggacttgaatggataggttggatctaccctgggtcacaagacaccaagtacaatgaaaaatttaaggggaaagccactctgacagtagatactagctcaagtaccgcctacatgcagctcggcagcctcacttccgaggactctgccgtatatttctgtgccaactacttcgggtcttctgggtggttctttgatgtgtggggaaccggcaccaccgtaaccgtttcctca

SEQ ID NO: 550 - DNA, 357 bp, synthetic construct
  misc_feature 1..357: note = 3B11.2G2 VH DNA sequence
  source 1..357: mol_type = other DNA
cagatccagttggtacagtctggacctgagctgaagaagcctggagagacagtcaagatctcctgcaagacttctgggtataaattcaaaacctatgtaatgagctgggtgaaacaggctccaggaaaggctttaaagtggatgggctggataaacacctactctggagtgccaacatatgctgatgacttcaagggacggtttgccttctctttggaaacctctgccagcactgcctatttggagatcatcaacctcaaaaatgaggacacggctacatatttctgtgcaagagatggtaattacggggatcctatggactactggggtcaaggaacctcagtcaccgtctcctca

SEQ ID NO: 551 - DNA, 339 bp, synthetic construct
  misc_feature 1..339: note = 7D8.2D8 VH DNA sequence
  source 1..339: mol_type = other DNA
gaagtgcagctggtggagtctgggggaggcttagtgaagcctggagggtccctgaaactctcctgtgcagcctctggattcactttcagtagctatgccatgtcttgggttcgccagactccggaaaagaggctggagtgggtcgcaaccatcagtgatggtggtatttacacctactatccagacaatgtaaagggccgattcaccatttccagagacaatgccaagaacaacctgttcctgcaaatgagccatctgaagtctgaggatacagccatgtattactgtgtaagagatgggggctactggggccaaggcaccactctcacagtctcctca

SEQ ID NO: 552 - DNA, 348 bp, synthetic construct
  misc_feature 1..348: note = mIMT001 VH DNA sequence
  source 1..348: mol_type = other DNA
cagatccaacttgtgcagtcaggtccagaattgaagaagcctggtgagaccgtcaagatttcctgtaaggcctctggttatacttttaccaactatggcatgaattgggtcaagcaggcacctgggaagggtttgaaatggatggggtggataaataccaacacaggggaaccaacttacgttgaagagtttaagggtcgttttgcattcagtcttgagacttctgcaagcacagcttacctccaaattaacaatctcaaaaatgaagatactgctacatatttctgtgctccttatgataattttttcgcctactggggacagggaactctggtcaccgtctcagca

SEQ ID NO: 553 - DNA, 348 bp, synthetic construct
  misc_feature 1..348: note = 4A11.2B5 VH DNA sequence
  source 1..348: mol_type = other DNA
caggtacaacttcagcagagcggtccagaacttgtgaagcccggtgctagtgtcaaaatatcttgcaaagcaagtggttattccttcaccaactattacatacactgggtaaaacaacgtccagggcaaggactcgaatggattggttggatctaccccggcagcggcaacactaactacaacgagaagtttaaaggcaaagctactctcacagcagacacttctagcagtacaacaaatatgcagttgtcctctctgacttccgaagacagcgccgtctattactgttctactgcacccggaggttttgacgtctggggttccggcaccacagttaccgttagttcc

SEQ ID NO: 554 - DNA, 348 bp, synthetic construct
  misc_feature 1..348: note = 4A11.H1L1 VH DNA sequence
  source 1..348: mol_type = other DNA
caggtgcagctggtgcaatcaggagccgaagttaagaagcctggcgccagcgtcaaggtctcatgtaaagcctccggttacagtttcaccaactactatatgcactgggttaggcaagcaccaggccaggggcttgagtggatgggatggatctatccagggagcggtaacaccaattacaatgagaagtttcaagggcgcgtaaccatgacagcagataccagtataagcaccgcctatatggaactctctcggttgagatccgatgataccgctgtttattactgctctaccgcacctggtggtttcgacgtttggggccaaggtactacagtgaccgtatcatca

SEQ ID NO: 555 - DNA, 348 bp, synthetic construct
  misc_feature 1..348: note = 4A11.H4L2 VH DNA sequence
  source 1..348: mol_type = other DNA
caggtgcaactggtccagtctggggccgaggtcaaaaagcctggagcctccgtcaaagtgtcatgtaaagcctcagggtatagtttcaccaactactatatacattgggtcagacaagccccaggccagcgtcttgagtggatgggatggatttatcccggatcagggaatacaaactataacgagaaatttcaaggcagagttactctcactgccgatacctctgcaagtactacctatatggagctctccagtctcagaagcgaagacacagcagtatattactgtagcaccgccccaggcgggtttgacgtgtggggccaaggcactactgtaaccgttagctca

SEQ ID NO: 556 - DNA, 357 bp, synthetic construct
  misc_feature 1..357: note = 4G2.2G6 VH DNA sequence
  source 1..357: mol_type = other DNA
caaatacagctcgtgcagtctggtcccgatttgaagaagcctggagaaaccgtaaagataagctgtaaggctagtggttacactttcacaacatacgttatgtcatgggttaaacaggctcctggaaaagaccttaaatggatgggatggattaacacccatagcggtgtcccaacttacgctgacgattttaagggacgatttgacttttctctcgaaacttctgccaacacagcttttttgcagatcaacaatctcaagaatgaagacaccgcaacctatttctgcactcgagatgggaacgacggggatgcaatggataactggggacaaggcacatcagttaccgtgagctct

SEQ ID NO: 557 - DNA, 360 bp, synthetic construct
  misc_feature 1..360: note = 6B3.2D3 VH DNA sequence
  source 1..360: mol_type = other DNA
caggtgcagctgaagcagtcaggacctggcctagtgcagccctcacagagcctgtccatcacctgcacagtctctggtttctcattaactagttatggtgtacactgggttcgccagcctccaggaaagggtctggagtggctgggagtgatatggagtggtggaagcacagactataatgctgctttcatatccagactgagcatcagtaaggacaactccaagagccaagttttctttaaaatgaacagtctgcaagctgatgacactgccatatactactgtgccaaagggccttatgattacgacttaggctggtttgcttactggggccaagggactctggtcactgtctctgca

SEQ ID NO: 558 - DNA, 348 bp, synthetic construct
  misc_feature 1..348: note = 6H6.2D6 VH DNA sequence
  source 1..348: mol_type = other DNA
cagatccagctggtgcagtccggccccgagctgaagaagcccggcgagactgtgaagatctcctgcaaggcctccggctacaccttcaccacctacggcatgtcctgggtgaagcaggcccccggcaagggcctgaagtggatggcctggatcaacacctactccggcgtgcccacctacgccgacgacttcaagggcaggttcgccttctccctggagacttccgcctccaccgcctacctgcagatcaacaacctgaccaacgaggacaccgccacctacttctgcgccaggggcccctacgccatggactactggggccagggcacctccgtgaccgtgtcctcc

SEQ ID NO: 559 - DNA, 345 bp, synthetic construct
  misc_feature 1..345: note = 9H2.2H10 VH DNA sequence
  source 1..345: mol_type = other DNA
caggtccagctgcagcagcctggggctgaactggtggggcctgggtcttcagtgaagctgtcctgcaaggcttctggctacaccttcaccaactactggatacattgggtgaagcagaggcctctacaaggccttgaatggattggtaacattgacccttctgatagtgaaactcactacaatcaaaagttcaaggacaaggccacattgactgtagacaaatcctccagcacagcctacatgcaactcagcagcctgacatctgaggactctgcggtctattactgtgcaagacatggttactacgactactggggccaaggcaccactctcacagtctcctca

SEQ ID NO: 560 - DNA, 357 bp, synthetic construct
  misc_feature 1..357: note = 13G4.2F8 VH DNA sequence
  source 1..357: mol_type = other DNA
caggtccagctgcagcagcctggggctgagctggtaaagcctggggcttcagtgaagttgtcctgcaaggcttctggctacactttcaccagctactggatgcactgggtgaagcagaggcctggacaaggccttgagtggattggaatgattcatcctaacagtggtagtactgactacaatgagaagttcaagaacaaggccacactgaatgtagacaaatcctccagtacagcctacatacaactcagcagcctgacatctgaggactctgcggtctattactgtacaagatgggggatttattactacgcgagggactactggggccaaggcaccactctcacagtctcctca

SEQ ID NO: 561 - DNA, 351 bp, synthetic construct
  misc_feature 1..351: note = 13H12.2F8 VH DNA sequence
  source 1..351: mol_type = other DNA
cagatccagctggtccaatcaggacccgaactgaaaaaaccaggcgagacagtcaaaatcagctgtaaggcctcaggctacactttcacaacctacgggatgtcatgggtaaagcaagctcctggcaaggggctgaaatggatgggttggatcaacacatactctggagtgcccacctacgctgacgactttaagggtagattcgcatttagcctggaaacaagtgccagtacagcctacctccagataaacaacttgaaaaacgaggataccgcaacctatttttgcgccgtcccctacgagtacgacggtgcctattggggtcagggtacactcgtaacagtttccgcc

SEQ ID NO: 562 - DNA, 345 bp, synthetic construct
  misc_feature 1..345: note = 15G7.2A7 VH DNA sequence
  source 1..345: mol_type = other DNA
gaggtccagctgcaacaatctggacctgagctggtgaagcctggggcttcagtgaagatatcctgtaaggcttctggatacacgttcactgactactacatgaactgggtgaagcagagccatggaaagagccttgagtggattggagatattaatcctaacaatggtggtactaactacaaccagaagttcaagggcaaggccacattgactgtagacaagtcctccagcacagcctacatggagctccgcagcctgacatctgaggactctgcagtctattactgcacctcaggctacgggtttccttactggggccaggggactctggtcactgtctctgca

SEQ ID NO: 563 - DNA, 351 bp, synthetic construct
  misc_feature 1..351: note = 19D9.2E5 VH DNA sequence
  source 1..351: mol_type = other DNA
cagatccagttggtacagtctggacctgagctgaagaagcctggagagacagtcaagatctcctgcaaggcttctggatataccttcacaacctatggaatgggctgggtgaaacaggctccaggaaagggtttgaagtggatgggctggataaacacctactctggcgtgccaacatatgctgatgacttcaagggacggtttgccttctctttggaaacctctaccagcactgcctatttgcagatcaacaacctcaaaaatgaggacatggctacatatttctgtgcaaccccttatgaatacgacggggcttactggggccaagggactctggtcactgtctctgca

SEQ ID NO: 564 - DNA, 336 bp, synthetic construct
  misc_feature 1..336: note = 23B10.2B12 VH DNA sequence
  source 1..336: mol_type = other DNA
caggtccagctgcagcagtctggacctgaactggtgaagcctggggattctgtgaagatatcctgcaaggctgctggctacaccttcagtgactattatataaactgggtgaagcagaggcctggacagggacttgagtggattggatggatttatcctgtaagcgttaatactaagtacaatgagaagttcaagggcaaggccacattgactgtagacacatcctccagcacagcctacatgcagctcagcagcctgacctctgaggactctggggtctatttctgtgcctaccttgattattggggccaagggactctggtcactgtctctgca

SEQ ID NO: 565 - DNA, 360 bp, synthetic construct
  misc_feature 1..360: note = 24D12.2H9 VH DNA sequence
  source 1..360: mol_type = other DNA
caggtgcagctgaagcagtcaggacctggcctagtgcagccctcacagagcctgtccatcacctgcacagtctctggtttctcattaactagctatggtgtacactgggttcgccaggctccaggaaagggtctggaatggctgggagtgatatggagtggtggaagcacagactataatgctgctttcatgtccagactgagcatcagcaaggacaactccaagagccaagttttctttaaaatgaacagtctgcaagctgatgacactgccatatactactgtgccaaaagccctgatggttacgacgtcgcctggtttggttactggggccaagggactctggtcactgtctctgca

SEQ ID NO: 566 - DNA, 366 bp, synthetic construct
  misc_feature 1..366: note = F846C.1B2 VH DNA sequence
  source 1..366: mol_type = other DNA
cagatccagttggtgcagtctggacctgagctgaagaagcctggagagacagtcaagatctcctgcaaggcttctgggtataccttcacaaactatggaatgaattgggtgaagcaggctccaggaaagggtttaaagtggatgggctggataaacacctacactggagagccatcatatgctgatgacttcaagggacggtttgccttctctttggaaacctctgccagcactgcctatttgcagatcaacaacctcaaaaatgaggacatggctacatatttctgtgcaagatgggggggttacgctggggattactatgctatggacttctggggtcaaggaacctcagtcaccgtctcctca

SEQ ID NO: 567 - DNA, 366 bp, synthetic construct
  misc_feature 1..366: note = F846C.1F5 VH DNA sequence
  source 1..366: mol_type = other DNA
cagatccagttggtgcagtctggacctgagctgaagaagcctggagagacagtcaagatctcctgcaaggcttctgggtataccttcacaaactatggaatgaactgggtgaagcaggctccaggaaagggtttaaagtggatgggctggataaacacctacactggagagccatcatatgctgatgacttcaagggacggtttgccttctctttggaaacctctgccagcactgcctatttgcagatcaacaacctcaaaaatgaggacatggctacatatttctgtgcaagatgggggggttacgatggggattactatgctatggactactggggtcaaggaacctcagtcaccgtctcctca

SEQ ID NO: 568 - DNA, 366 bp, synthetic construct
  misc_feature 1..366: note = F846C.1H12 VH DNA sequence
  source 1..366: mol_type = other DNA
cagatccagttggtgcagtctggacctgagctgaagaagcctggagagacagtcaagatctcctgcaaggcttctgggtataccttcacaaactttggaatgaactgggtgaagcaggctccaggaaagggtttaaagtggatgggctggataaacacctacactggagagccatcatatgctgatgacttcaagggacggtttgccttctctttggaaacctctgccagcactgcctatttgcagatcaacaacctcaaaaatgaggacattgctacatatttctgtgcaagatgggggggttacgctggggattactatgctatggactactggggtcaaggaacctcagtcaccgtctcctca

SEQ ID NO: 569 - DNA, 348 bp, synthetic construct
  misc_feature 1..348: note = F846C.1H5 VH DNA sequence
  source 1..348: mol_type = other DNA
gaggtccagctgttggagtctgggggaggcttagtgaagcctggagggtccctgaaactctcctgtgcagcctctggattcactttcagcagctatgccatgtcttgggttcgccagactccagagaagaggctggagtgggtcgcatccattagtagtggtggtgacacctactatccagacagtgtgaagggccgattcaccatctctagagataatgccaggaacatcctgtacctgcaaatgagcagtctgaggtctgaggacacggccatgtattactgtgcaagttatggtaactccctctttgactactggggccaaggcaccactctcacagtctcctca

SEQ ID NO: 570 - DNA, 366 bp, synthetic construct; identical to SEQ ID NO: 567
  misc_feature 1..366: note = F846C.2H3 VH DNA sequence
  source 1..366: mol_type = other DNA

SEQ ID NO: 571 - DNA, 342 bp, synthetic construct
  misc_feature 1..342: note = F846TC.14A2 VH DNA sequence
  source 1..342: mol_type = other DNA
cagatccagttggtgcagtctggacctgagctgaagaagcctggagagacagtcaagatctcctgcaaggcttctgggtataccttcacaaactatggaatgaactgggtgaagcaggctccaggaaagggtttaaagtggatgggctggataaacacctacactggagagccaacatatgctggtgacctcaagggacggtttgccttctctttggaaacctctgccagcactgcctatttgcagatcaacaacctcaaaaatgaggacacggctacatatttctgtgtaagatatactatggactactggggtcaaggaacctcagtcaccgtctcctca

SEQ ID NO: 572 - DNA, 372 bp, synthetic construct
  misc_feature 1..372: note = F846TC.14E4 VH DNA sequence
  source 1..372: mol_type = other DNA
caggttactctgaaagagtctggccctgggatattgcagccctcccagaccctcagtctgacttgttctttctctgggttttcactgagcacttctggtatgggtgtaggctggattcgtcagccttcagggaagggtctggagtggctggcacacatttggtgggatgatgataagtactataacacagccctgaagagcgggctcacaatctccaaggatgcctccaaaaaccaggtcttcctcaagatcgccagtatggacactgcagatactgccacatactactgtgctcgaaacctctatgatggttcctacgggtactatgctatggactactggggtcaaggaacctcagtcaccgtctcctca

SEQ ID NO: 573 - DNA, 366 bp, synthetic construct
  misc_feature 1..366: note = F846TC.16B5 VH DNA sequence
  source 1..366: mol_type = other DNA
cagatccagttggtgcagtctggacctgagctgaagaagcctggagagacagtcaagatctcctgcaaggcttctgggtataccttcacaaactatggaatgaactgggtgaagcaggctccaggaaagggtttaaagtggatgggctggataaacacctacactggagagccagcatatgctgatgacttcaagggacggtttgccttctctttggaaacctctgccagcactgcctatttgcagatcaacaacctcaaaaatgaggacatggctacatatttctgtgcaagatgggggggttacgatggggattactatgctatggactactggggtcaaggaacctcagtcaccgtctcctca

SEQ ID NO: 574 - DNA, 369 bp, synthetic construct
  misc_feature 1..369: note = F846TC.7F10 VH DNA sequence
  source 1..369: mol_type = other DNA
gaagtgcagctggtggagtctgggggagacttagtgaagcctggagggtccctgaaactctcctgtgcagcctctggattcactttcagtaactatggcttgtcttggattcgccagactccagacaagaggctggagtgggtcgcaaccattagtagtggtggtagttacacctactatcctgacagtgtgaaggggcgattcaccatctccagagacagtgccaagaacaccctgtacctgcaaatgagcagtctgaagtctgaggacacagccatgtattactgtgcaagacatgcgcattactacggtgttagcccgtactactttgactactggggccaaggcacctgtctcacagtctcctca

SEQ ID NO: 575 - DNA, 357 bp, synthetic construct
  misc_feature 1..357: note = F847C.10B9 VH DNA sequence
  source 1..357: mol_type = other DNA
cagatccagttggtgcagtctggacctgaggtgaagaagcctggagagacagtcaagatctcctgcaaggcttctgggtatatcttcacaaactatggaatgaactgggtgaagcaggctccaggaaagggtttaaagtggatgggctggataaacacctacactggagagccaacatatactgatgacttcaagggacggtttgccttctctttggaaacctctgccagcactgcctatttgcagatcaacaacctcaaaaatgaggacacggctacatatttctgtgcaaagtttggtaactacgtgggagctatggactactggggtcaaggaacctcagtcaccgtctcctca

SEQ ID NO: 576 - DNA, 360 bp, synthetic construct
  misc_feature 1..360: note = F847C.11B1 VH DNA sequence
  source 1..360: mol_type = other DNA
gaggtccagcttcagcagtctggacctgagctggtgaaacctggggcctcagtgaagatatcctgcaaggcttctggaaacacattcactgaccacaacatgcactgggtgaagcagagccatggaaagagccttgagtggattggatatatttatccttacaatggtggtactggctacaaccagaagttcaagagcaaggccacattgactgtagacaattcctccagcacagtctacatggagctccgcagcctgacatctgaggactctgcagtctattactgtgcaagaggggagtatgattacctggcctggtttgcttactggggccaagggactctggtcactgtctctgca

SEQ ID NO: 577 - DNA, 357 bp, synthetic construct
  misc_feature 1..357: note = F847C.12F12 VH DNA sequence
  source 1..357: mol_type = other DNA
cagatccagttggtgcagtctggacctgagctgaagaagcctggagagacagtcaagatctcctgcaaggcttctgggtataccttcacaaactatggaatgaactgggtgaagcaggctccaggaaagggtttaaagtggatgggctggataaacacctacactggagagccaacatatgttgatgacttcaagggacggtttgccttctctttggaaacctctgccagcactgcctatttgcggatcaacaacctcaaaaatgaggacacggctacatatttctgtgcaaagtttggtaactacgtgggagctatggactactggggtcaaggaacctcagtcaccgtctcctca

SEQ ID NO: 578 - DNA, 357 bp, synthetic construct; identical to SEQ ID NO: 575
  misc_feature 1..357: note = F847C.26F5 VH DNA sequence
  source 1..357: mol_type = other DNA

SEQ ID NO: 579 - DNA, 351 bp, synthetic construct
  misc_feature 1..351: note = F847C.4B10 VH DNA sequence
  source 1..351: mol_type = other DNA
gaggtgcagcttgttgagactgggggaggcttagtgaagcctggagggtccctgaaactctcctgtgcagcctctggattcactttcagtagctatgccatgtcttgggttcgccagactccagagaagaggctggagtgggtcgcatccattagtagtggtggtagcacctactatccagacagtgtgaagggccgattcaccatctccagagataatgccaggaacatcctgtacctgcaaatgagcagtctgaggtctgaggacacggccatgtattactgtacaaggtttactacggtagtagagatggactactggggtcaaggaacctcagtcaccgtctcctca

SEQ ID NO: 580 - DNA, 336 bp, synthetic construct
  misc_feature 1..336: note = F849C.8D10 VH DNA sequence
  source 1..336: mol_type = other DNA
caggtccaactgcagcagactggtgctgagcttgtgaagcctggggcctcagtgaagctgtcctgcaaggcttctggctatactttcaccagctactggataaactgggtgaagcagaggcctggacaaggccttgagtggattggaaacatttatcctggtagtagtagtatttactacagtgagaagttcaagagtaaggccacactgactgtagacacatcctccagcacagcctacatgcagctcagcagcctgacatctgacgactctgcggtctattattgtgcaagatggggctactggggccaaggcaccactctcacagtctcctca

SEQ ID NO: 581 - DNA, 363 bp, synthetic construct
  misc_feature 1..363: note = F849C.8H3 VH DNA sequence
  source 1..363: mol_type = other DNA
caggttactctgaaagagtctggccctgggatattgcagccctcccagaccctcagtctgacttgttctttctctgggttttcactgagcacttttggtatgggtgtaggctggattcgtcagccttcagggaagggtctggagtggctggcacacatttggtgggatgatgataaacactataacccagccctgaagagccggctcacaatctccaaggatacctccaaaaaccaggtcttcctcaggatcgccaatgtggacactgcagataatgccacatattactgtgctcgaatcgactatggtgactacgtcgggtttgcttattggggccaagggactctggtcactgtctctgca

SEQ ID NO: 582 - DNA, 354 bp, synthetic construct
  misc_feature 1..354: note = 846.2B11 VH DNA sequence
  source 1..354: mol_type = other DNA
caggtccagctacagcagtctggacctgagctggtgaggcctggggctttagtgaagatttcctgcaaggcttctggttacaccttcacaagctacgatataaactgggtgaagcagaggcctggacagggacttgagtggattggatggatttatcctggagatggtagtactaaatataatgagaaattcaagggcaaggccacactgactgcagacaaatcctccagcacagcctacatgcagctcagcagcctgacttctgagaactctgcagtctatttctgtgcaagagaggcggcttctaatgctatggactactggggtcaaggaacctcagtcaccgtctcctca

SEQ ID NO: 583 - DNA, 366 bp, synthetic construct
  misc_feature 1..366: note = 846.4D5 VH DNA sequence
  source 1..366: mol_type = other DNA
gaagtgaagcttgaggagtctggaggaggcttggtgcaacctggaggatccatgaaactctcctgtgttgcctctggattcactttcagtaactactggatgaactgggtccgccagtctccagagaaggggcttgagtgggttgctgaaattagattgaaatctaataattatgcaacacattatgcggagtctgtgaaagggaggttcaccatctcaagagatgattccaaaagtagtgtctacctgcaaatgaacaacttaagagctgaagacactggcatttattactgtaccaggcactacggctttccctactggtacttcgatgtctggggcgcagggaccacggtcaccgtctcctca

SEQ ID NO: 584 - DNA, 354 bp, synthetic construct
  misc_feature 1..354: note = 846T.1H2 VH DNA sequence
  source 1..354: mol_type = other DNA
cagatccagttggtgcagtctggacctgagctgaagaagcctggagagacagtcaagatctcctgcaaggcttctgggtataccttcacaaactatggaatgaactgggtgaagcaggctccaggaaagggtttaaagtggatgggctggataaacaccaacactggagagccaacatatgctgaagagttcaagggacggtttgccttctctttggaaacctctgccagcactgcctatttgcagatcaacaacctcaaaaatgaggacacggctacatatttctgtgcaaccggggggggtaactgggactttgactactggggccaaggcaccactctcacagtctcctca

SEQ ID NO: 585 - DNA, 342 bp, synthetic construct
  misc_feature 1..342: note = 847.14H4 VH DNA sequence
  source 1..342: mol_type = other DNA
cagatccagttggtgcagtctggacctgaactgacgaagcctggagagacagtcaagatctcctgtaaggcttctggctataccttcacagactatggaatgaactgggtgaggcaggctccaggagagactttaaagtggatgggctggataaacacctacactggagagccaacatatgctgatgacttcaaggggcggtttgccttctctttggaatcctctgccagcactgcctatttgcagatcaacaacctcaaaaatgaggacgtggctacatatttctgtgcaagataccctatggactactggggtcaaggaacctcagtcaccgtctcctca

SEQ ID NO: 586 - DNA, 366 bp, synthetic construct
  misc_feature 1..366: note = 846.2D4 VH DNA sequence
  source 1..366: mol_type = other DNA
gaagtgaagcttgaggagtctggaggaggcttggtgcaacctggaggatccatgaaactctcctgtgttgcctctggattcactttcagtaactactggatgaactgggtccgccagtctccagagaaggggcttgagtgggttgctgaacttagattgaaatctaataattatgcaacacattatgcggagtctgtgaaagggaggttcaccatctcaagagatgattccaaaagtagtgtctacctgcaaatgaacaacttaagagctgaagacactggcatttattactgtaccaggcactacggctttccctactggtacttcgatgtctggggcgcagggaccacggtcaccgtctcctca

SEQ ID NO: 587 - DNA, 354 bp, synthetic construct
  misc_feature 1..354: note = 846.2F11 VH DNA sequence
  source 1..354: mol_type = other DNA
gaggtccagctgcagcagtctggacctgagctggtgaagcctggggcttcagtgaagatgtcctgcaaggcttctggatacacattcactagctatgttatgcactgggtgaagcagaagcctgggcagggccttgagtggattggatatattaatccttacaatgatggtactaagtacaatgagaagttcaaaggcaaggccacactgacttcagacaaatcctccagcacagcctacatggagctcagcagcctgacctctgaggactctgcggtctattactgtgcaagattacttttttactatgctatggactactggggtcaaggaacctcagtcaccgtctcctca

SEQ ID NO: 588 - DNA, 354 bp, synthetic construct
  misc_feature 1..354: note = 846T.10B1 VH DNA sequence
  source 1..354: mol_type = other DNA
caggttcagctgcagcagtctggacctgagctggtgaggcctggggctttagtgaagatttcctgcaaggcttctggttacaccttcacaagctacgatataaactgggtgaagcagaggcctggacagggacttgagtggattggatggatttatcctggagatggtagtactaaatacaatgagaaattcaagggcaaggccacactgactgcagacaaatcctccagcacagtttacatgcagctcagcagcctgacttctgagaactctgcagtctatttctgtgctagagaggcggcttctaatgccatggactactggggtcaaggaacctcagtcaccgtctcctca

SEQ ID NO: 589 - DNA, 354 bp, synthetic construct
  misc_feature 1..354: note = 846T.2E3 VH DNA sequence
  source 1..354: mol_type = other DNA
caggtccagctgcagcagtctggacctgagctggtgaagcctggggctttagtgaagatatcctgcaaggcttctggttacaccttcacaagctacgatataaactgggtgaagcagaggcctggacagggacttgagtggattggatggatttatcctggagatggtagtactaagtacaatgagaaattcaagggcaaggccgcactgactgcagacaagtcctccagcacagcctacatgcagctcagcagcctgacttctgagaactctgcagtctatttctgtgcaagagaggcggcttctaatgctatggactactggggtcaaggaacctcagtcaccgtctcctca

SEQ ID NO: 590 - DNA, 354 bp, synthetic construct
  misc_feature 1..354: note = 846T.4C9 VH DNA sequence
  source 1..354: mol_type = other DNA
gaggtccagctgcagcagtctggacctgagctggtaaagcctggggcttcagtgaagatgtcctgcaaggcttctggatactcattcactaactatattatgcactgggtgaagcagaagcctgggcagggccttgagtggattggatatattaatccttacaatgatggtactaagtacaatgagaagttcaaaggcaaggccacactgacttcagacaaatcctccagcacagcctacatggagctcagcagcctgacctctgaggactctgcggtctattactgtgcaagattacttttttactatgctatggactactggggtcaaggaacctcagtcaccgtctcctca

SEQ ID NO: 591 - DNA, 354 bp, synthetic construct
  misc_feature 1..354: note = 846T.4E11 VH DNA sequence
  source 1..354: mol_type = other DNA
caggttcagctgcagcagtctggagctgaactggtaaagcctggggcttcagtgaagttgtcctgcaaggcttctggctacaccttcagaagctatgatataaactgggtgaggcagaggcctgaacagggacttgagtggattggatggatttttcctggagaaggtatttctaagtacaatgagaagttcaagggcaaggccacactgactacagacaaattgtccagcacagcctacatgcagctcagcagcctgacatctgaggactctgctgtctatttctgtgcaagagaggctacggctggggctatggactactggggtcaaggaacctcagtcaccgtctcctca

SEQ ID NO: 592 - DNA, 366 bp, synthetic construct
  misc_feature 1..366: note = 846T.4F5 VH DNA sequence
  source 1..366: mol_type = other DNA
gaggtgaagcttctcgagtctggaggaggcttggtgcaacctggaggatccatgaaactctcctgtgttgcctctggattcactttcagtaacttctggatgaactgggtccgccagtctccagagaaggggcttgagtgggttgctgaaattagattgaaatctaataattatgcaacacattatgcggagtctgtgaaagggaggttcaccatctcaagagatgattccaaaagtagtgtctacctgcaaatgaacaacttaagagctgaagacactggcatttattactgtaccaggcactacggctttccctactggtacttcgatgtctggggcgcagggaccacggtcaccgtctcctca

SEQ ID NO: 593 - DNA, 354 bp, synthetic construct
  misc_feature 1..354: note = 846T.8D1 VH DNA sequence
  source 1..354: mol_type = other DNA
cagattcagttgcagcagtctggagctgaactggtaaagcctggggcttcagtgaagttgtcctgcaaggcttctggctacaccttcacaagctatgatatatgctgggtgaggcagaggcctgagcagggacttgagtggattggatggatttttcctggagatggtactactaagtacactgagaacttcaagggcaaggccacactgactacagacaaatcctccagcacagcctacatgcacctcagcaggctgacatctgaggactctgctgtctatttctgtgcaagggagggggcgggctcctggtttgcttactggggccaagggactctggtcactgtctctgca

SEQ ID NO: 594 - DNA, 342 bp, synthetic construct
  misc_feature 1..342: note = 847.10C9 VH DNA sequence
  source 1..342: mol_type = other DNA
gaggttcagctgcagcagtctggagctgagctggtgcggcctgggacttcagtgaaggtgtcctgcaaggcttcggaatacgccttcaataattacatgatggaatgggtaaaacagaggcctggacagggccttgagtggattggagtgattaatcccggaagtggtgctactaattacaatgagaatttcaaggacaaggcaacactgactgcagacaaatcctccaccactgcctacatgcagctcagcagcctgacatctgatgactctgcggtctatttctgtacctacaatgatcttggttactggggccaagggactctggtcactgtctctgca

SEQ ID NO: 595 - DNA, 369 bp, synthetic construct
  misc_feature 1..369: note = 847.11D6 VH DNA sequence
  source 1..369: mol_type = other DNA
gaggtcaagctgcagcagtctggacctgagctgatgaagcctggaacttcaatgaagatatcctgtaaggcttctggttactcattcaccggctacaccatgaactgggtgaagcagagccatggaaagaaccttgagtggattggacttattaatccttacaatggtggtactaactacaaccagaagttcaggggcaaggccacattaagtgtagacaagtcatccaacacagcctacatggagctcctcagtctgacatctgaagactctgcagtctattactgtgcaagaaaggacgattattacggaagtagtccctatgctctggactactggggtcaaggaacctcagtcaccgtctcctca

SEQ ID NO: 596 - DNA, 348 bp, synthetic construct
  misc_feature 1..348: note = 847.15D12 VH DNA sequence
  source 1..348: mol_type = other DNA
caggtccagctgcagcagtctggagctgagctgatgaagcctggggcctcagtgaagatatcctgcaaggctactggctacacattcactaactactggatagagtgggtaaagcagaggcctggacatggccttgaatggattggagaatttttacctggagatggcagtagtcactacaatgagaagttcaagggcaaggccacattcacttcagatacatcctccaacacagcctacatacacctcaccagcctgacatctgaggactctgccgtctattactgtgtaagagatgactacgacagtgactactgggcccaaggcaccactctcacagtctcctca

SEQ ID NO: 597 - DNA, 360 bp, synthetic construct
  misc_feature 1..360: note = 847.15F9 VH DNA sequence
  source 1..360: mol_type = other DNA
caggtgcagatgaagcagtcaggacctggcctagtgcagccctcacagagcctgtccatcacctgcacagtctctggtttctcattaatcaactatggtgtacactgggttcgccaatctccaggaaagggtctggagtggctgggagtgatatggagtggtggaagcacagactataatgcagctttcatatccagactgagcatcagcaaggacaattccaagagccaagttttctttaaaatgaacagtctgcaagctgatgacacagccatatattactgtgccagaatttattactacggtaggggctatgctatggactactggggtcaaggaacctcagtcaccgtctcctca

SEQ ID NO: 598 - DNA, 366 bp, synthetic construct
  misc_feature 1..366: note = 847.15H11 VH DNA sequence
  source 1..366: mol_type = other DNA
gaggtccagcttcagcagtctggggctgaagttgtgaagcctggggctccagtgaagctgtcctgcaaggcttctggctacaccttcaacaactactggctgaactgggtgaaacagcggcctggacgaggcctcgagtggattggaaggattgatccttccgatagtgaaactcactacaatcaaaagttcaaggacaaggccacactgactgtagacatgtcctccagcacagcctacatccaactcagcagcctgacatctgaggactctgcggtctattactgtgcaagaggggattattattacggtactaggggtcctatggactactggggtcaaggcacctcagtcaccgtctcctca

SEQ ID NO: 599 - DNA, 345 bp, synthetic construct
  misc_feature 1..345: note = 847.20H7 VH DNA sequence
  source 1..345: mol_type = other DNA
caggtccagctgcagcagtctggggctgagctggtgaggcctggggcttcagtgaacctgtcctgcaaggcttctggctacaccttcaccaactactggatgaactgggtgaagcagaggcctggacaaggccttgaatgggttggtatgattgatccttcagacagtgaaactcactacaatcaaatgttcaaggacaaggccacattgactatagacaaatcttccagcatagcctacatgcagctcagcagcctgacatctgaggactctgcggtctattactgtgcaagatggggtgctatggactactggggtcaaggaacctcagtcaccgtctcctca

SEQ ID NO: 600 - DNA, 363 bp, synthetic construct
  misc_feature 1..363: note = 847.21B11 VH DNA sequence
  source 1..363: mol_type = other DNA
caggtgcaactgaagcagtcaggacctggcctggtggcgccctcacagagcctgtccatcacttgcactgtctctggattttcattaaccagctatggtgtacactgggttcgccagcctccaggaaagggtctggagtggctgggaataatatgggctggtggaagcacaaattataatccggctctcatgtccagactgagcatcagcaaagacaaatccaagagccaagttttcttaaaaatgaacagtctgaaaactgatgacacagccatgtactactgtgccagagatcgggcttcattactacggccgggggctatggactactggggtcaaggaacctcagtcaccgtctcctca

SEQ ID NO: 601 - DNA, 354 bp, synthetic construct
  misc_feature 1..354: note = 847.27B9 VH DNA sequence
  source 1..354: mol_type = other DNA
cagatccagttggtgcagtctggacctgagctgaagaagcctggagagacagtcaagatctcctgcaaggcttctgggtataccttcacaaactatggaatgaactgggtgaagcaggctccaggaaagggtttaaagtggatgggctggataaacaccaacactggagagccaacatatgctgaagagttcaagggacggtttgccttctctttggagacctctgccagcactgcctatttgcagatcaactacctcaaaaatgaggacacggctacatttttctgtgcaagattggactatgattacgacgaggactactggggccaaggcaccactctcacagtctcctca

SEQ ID NO: 602 - DNA, 360 bp, synthetic construct
  misc_feature 1..360: note = 847.28D1 VH DNA sequence
  source 1..360: mol_type = other DNA
caggtgcagcttgtagagaccggacctggcctggtggcgccctcacagagcctgtccatcacttgcactgtctctgggttttcattaaccagctatggtgtacactggattcgtcagtctccaggaaagggtctggagtggctgggaactatatgggctggtggaagcacagattataattcgccactcatgtccagactgagcatcagcaaagacaactccaagaaccaagtttttttaaaaatgaatagtctgcagattgatgacacagccatatattattgtgccagtcctccttctgggtatgattacgacgtgtttgcttcctggggccaagggactctggtcactgtctctgca

SEQ ID NO: 603 - DNA, 360 bp, synthetic construct
  misc_feature 1..360: note = 847.2B8 VH DNA sequence
  source 1..360: mol_type = other DNA
caggtacaactgaagcagtcaggacctggcctagtgcagccctcacagagcctgtccatcacctgcacagtctctggtttctcattaatcaactatggtgtacactgggttcgccaatctccaggaaagggtctggagtggctgggagtgatatggagtggtggaagcacagactataatgcagctttcatatccagactgagcatcagcaaggacaattccaagagccaagttttctttaaaatgaacagtctgcaagctgatgacacagccatatattactgtgccagaatttattactacggtaggggctatgctatggactactggggtcaaggaacctcagtcaccgtctcctca

SEQ ID NO: 604 - DNA, 360 bp, synthetic construct
  misc_feature 1..360: note = 847.3B3 VH DNA sequence
  source 1..360: mol_type = other DNA
caggtgcagctgaaggagtcaggacctggcctggtggcgccctcacagagcctgtccatcacttgcactgtctctgggttttcattaaccagctatggtgtacactggattcgccagcctccaggaaagggtctggagtggctgggaggaatatgggctggtggaagtacagattacaattcgcctctcatgtcccgactgagtatcactaaagacaactccaagagccaagttttcttaaaaatgaacagtctgcaaagtgatgacacagccatgtactactgtgccagtcctccctctgggtatgattacgacgtgtttgcttactggggccaagggactctggtcactgtctctgca

SEQ ID NO: 605 - DNA, 360 bp, synthetic construct
  misc_feature 1..360: note = 849.1D2 VH DNA sequence
  source 1..360: mol_type = other DNA
caggtgcagctgaaggagtcaggacctgtcctggtggcgccctcacagagcctgtccatcacttgcactgtctctgggttttcattaagcagctatggtgtacactgggttcgccagcctccaggaaagggtctggagtggctgggagtaatatgggctggtggaagcacagattatgattcagctctcatgtccagactgagcatcagcaaagacaactccaagagccaagttttcttaaaaatggacagtctgcaaactgatgacacagccatgtactactgtgccaaacccccatatgattacgacggggcctggtttgcttactggggccaagggactctggtcactgtctctgca

SEQ ID NO: 606 - DNA, 342 bp, synthetic construct
  misc_feature 1..342: note = 849.2D7 VH DNA sequence
  source 1..342: mol_type = other DNA
caggtgcaactgcagcagtctgggcctcagctggttaggcctggggcttcagtgaagatatcctgcaaggcttctggttactcattcaccaactactggatgcactgggtgaagcagaggcctggacaaggtcttgagtggattggcatgattgatccttccgatagtgaaactaggttaaatcagaagttcaaggacaaggccacattgactgtagacaaatcctccagcacagcctacatgcaactcagcagcccgacatctgaggactctgcggtctattactgtgcaacggggagacccgactactggggccaaggcaccactctcacagtctcctca

SEQ ID NO: 607 - DNA, 342 bp, synthetic construct
  misc_feature 1..342: note = 849.2F12 VH DNA sequence
  source 1..342: mol_type = other DNA
caggtgcaactgcagcagtctgggcctcagctggttaggcctggggcttcagtgaagatatcctgcaaggcttctggttactcattcaccagctactggatgcactgggtgaagcagaggcctggacaaggtcttgagtggattggcatgattgatccttccgatagtgaaactaggttaaatcagaagttcaaggacaaggccacattgactgtagacaaatcctccagcacagcctacatgcaactcagcagcccgacatctgaggactctatagtctattactgtgcaaaggggagacccgactactggggccaaggcaccactctcacagtctcctca

SEQ ID NO: 608 - DNA, 354 bp, synthetic construct
  misc_feature 1..354: note = 849.4B2 VH DNA sequence
  source 1..354: mol_type = other DNA
gatggaaaacttcaggagtcaggacctggcctcgtgaaaccttctcagtctctgtctctcacctgctctgtcactggctactccatcaccagtggttattactggaactggatccggcagtttccaggaaacaaactggaatggatgggccacataagctacgatggtagaaataactacaacccatctctcaaaaatcgaatctccatcactcgtgacacatctaagaaccagtttttcctgaagttgaattctgtgactactgaggacacagccacatattactgtgcaggctatgatttcctctggtacttcgatgtctggggcacagggaccacggtcaccgtctcctca

SEQ ID NO: 609 - DNA, 363 bp, synthetic construct
  misc_feature 1..363: note = 849.4F12 VH DNA sequence
  source 1..363: mol_type = other DNA
caggtgcagctgaaggagtctggccctgggatattgcagccctcccagaccctcagtctgacttgttctttctctgggttttcactgagcacttttggtatgggtgtaggctggattcgtcagccttcagggaagggtctggagtggctggcacacatttggtgggatgatgataaacactataacccagccctgaagagccggctcacaatctccaaggatacctccaaaaaccaggtcttcctcaggatcgccaatgtggacactgcagataatgccacatattactgtgctcgaatcgactatggtgactacgtcgggtttgcttattggggccaagggactctggtcactgtctctgca

SEQ ID NO: 610 - DNA, 354 bp, synthetic construct
  misc_feature 1..354: note = 849.4F2 VH DNA sequence
  source 1..354: mol_type = other DNA
gatggacagcttcaggagtcaggacctggcctcgtgaaaccttctcagtctctgtctctcacctgctctgtcactggctactccatcaccagtggttattactggaactggatccggcagtttccaggaaacaaactggaatggatgggccacataagctacgatggtagaaataactacaacccatctctcaaaaatcgaatctccatcactcgtgacacatctaagaaccagtttttcctgaagttgaattctgtgactactgaggacacagccacatattactgtgcaggctatgatttcctctggtacttcgatgtctggggcacagggaccacggtcaccgtctcctca

SEQ ID NO: 611 - DNA, 357 bp, synthetic construct
  misc_feature 1..357: note = 849.5C2 VH DNA sequence
  source 1..357: mol_type = other DNA
gaggttcagctgcagcagtctggggcagagcttgtgaagtcaggggcctcagtcaagttgtcctgcacagcttctggcttcaacattaaagactactatatgcactgggtgaagcagaggactgaacagggcctggagtggattggaaggatttatcctgaggatgatgaaactaaatatgccccgaaattccagggcaaggccactataacagcagacacatcctccaacacagcctacctgcagctcagcagcctgacatctgaggacactgccgtctattactgtgctagatcagggggttactacgtttggtttgcttactggggccaagggactctggtcactgtctctgca

SEQ ID NO: 612 - DNA, 363 bp, synthetic construct
  misc_feature 1..363: note = 849.8D12 VH DNA sequence
  source 1..363: mol_type = other DNA
gaggtccagctacaacagtctggacctgagctggtgaagcctgggtcttcagtgaagatatcctgcaaggcttctagatacacattcactgactacaacatggactgggtgaagcagagccatggaaagagacttgagtggattggatatatttatcctaacaatggtggtactggctacaaccagaagttcaagggcaaggccacattgactgtagacaagtcctccagcacagcctacatggagctccgcagcctgacatctgaggactctgcagtctattactgtgcaaggtcctactacgatggtagctacgatgctatggactactggggtcaaggaacctcagtcaccgtctcctca

SEQ ID NO: 613 - DNA, 342 bp, synthetic construct
  misc_feature 1..342: note = F847C.21H6 VH DNA sequence
  source 1..342: mol_type = other DNA
cagatccagttggtgcagtctggacctgagctgaagaagcctggagagacagtcaagatctcctgcaaggcttctgggtataccttcacaatctttggaatgaactgggtgaagcaggctccaggaaagggtttaaagtggatgggctgggtaaacacctacactggagagccaacatatgctgatgacttcaagggacggtttgccttctctttggaaacctctgccagcactgcctatttgcagatcaacaacctcaaaaatgaggacacggctacatatttctgtgcaagaggctggtttgcttactggggccaagggactctggtcactgtctctgca

SEQ ID NO: 614 - DNA, 360 bp, synthetic construct
  misc_feature 1..360: note = 849.5H1 VH DNA sequence
  source 1..360: mol_type = other DNA
caggtgcagctgaaggagtcaggacctgtcctggtggcgccctcacagagcctgtccatcacttgcactgtctctgggttttcattaaccagttatggtatacactgggttcgccagcctccaggaaagggtctggagtggctgggagtaatatgggctggtggaagcacaaattataattcagctctcatgtccagactgagcatcagcaaagacaactccaagagccaagttttcttaaaaatgaacagtctgcaaattgatgacacagccatgtactattgtgccaaacccccccatgattacgaccaggcctggtttgcttactggggccaagggactctgatcactgtctctgca

SEQ ID NO: 615 - DNA, 348 bp, synthetic construct
  misc_feature 1..348: note = 847.23F11 VH DNA sequence
  source 1..348: mol_type = other DNA
caggtccagctgcagcagtctggggctgagctggtgaggcctggggcttcagtgaagctgtcctgcaaggcttctggctacaccttcaccagctcctggatgaactgggtgaaacagaggcctggacaaggccttgactggattggtatgattgatccttcagacagtgaaactcactacaatcaaatgttcaaggacaaggccacattgactgtagacaaatcctctaacacagcctacatgcagctcagcaggctgacatctgaggactcagcggtctattactgtgtaaatagtaactacgagagtggctattggggccaaggcaccactctcacagtctcctca

SEQ ID NO: 616 - DNA, 348 bp, synthetic construct
  misc_feature 1..348: note = 847.16D10 VH DNA sequence
  source 1..348: mol_type = other DNA
caggtccagctgcagcagtctggggctgagctggtgaggcctggggcttcagtgaagctgtcctgcaaggcttctggctacaccttcaccggctactggttgaactgggtgaagcagaggcctggacaaggcctggaatggattggtatgattgatccttcagacagtgaaactcactacaatcaagtgttcaaggacaaggccacaatgactgtagacaggtcctccagcacagcctacatgcagctcagcggactgacatctgaggactctgcggtctattactgtgcaaatagtaactacgcgagtggctcctggggccagggcaccactctcacagtctcctca

SEQ ID NO: 617 - DNA, 360 bp, synthetic construct
  misc_feature 1..360: note = 847.13E2-mH0mL1 VH DNA sequence
  source 1..360: mol_type = other DNA
gaggtccagcttcagcagtctggacctgagctggtgaagcctggggcttcagtgaaggtttcctgcaaggcttctggttactcattcactgactacaacatgtactgggtgatgcagagccatggaaagagccttgagtggattggatatattgatccttacaatgatgctactagctacagccagaagttcacgggcaaggccacattgactgttgacaagtcctccagcacagccttcatgcatctcaacagcctgacatctgaggactctgcagtctattactgtgcaagatgggggaggtacgaatactatgctatggactattggggtcaaggaacctcagtcaccgtctcctca

SEQ ID NO: 618 - DNA, 360 bp, synthetic construct; identical to SEQ ID NO: 617
  misc_feature 1..360: note = 847.13E2-mH0mL2 VH DNA sequence
  source 1..360: mol_type = other DNA

SEQ ID NO: 619 - DNA, 345 bp, synthetic construct
  misc_feature 1..345: note = 847.12C4 VH DNA sequence
  source 1..345: mol_type = other DNA
caggtacagctgaaggagtcaggacctgaccttgtgcagccctcacagaccctgtctctcacctgcactgtctctgggttctcattaaccatctatggtgttcactgggttcgccagcctccaggaaagggactggagtgggtgggaacagtggcctgggatgacaaaaaatattataattcacctctacaatctcgactgagcatcagcagggatacctccaagaaccaagttttcttaaaactgagcagtctgcaaactgaagacacagccatgtactactgtactatgactgggggccctataaactactggggtccaggaacctcagtcaccgtctcctca

SEQ ID NO: 620 - DNA, 351 bp, synthetic construct
  misc_feature 1..351: note = 847.4D3 VH DNA sequence
  source 1..351: mol_type = other DNA
gaggtgcagctggtggagtctgggggaggcttagtgaagcctggagggtccctgaaactctcctgtgcagcctctggattcactttcagtagctatgccatgtcttgggttcgccagactccagagaagaggctggagtgggtcgcatccattagtagtggtgatagcccctactatccagacagtgtgaagggccgcttcaccatctccagagataatgccaggaacatcctgtacctgcaaatgagcagtctgaggtctgaggacacggccatgtattactgtacaaggtttactacggtagtagagatggactactggggtcaaggaacctcagtcaccgtctcctca

SEQ ID NO: 621 - DNA, 336 bp, synthetic construct
  misc_feature 1..336: note = TB001 VL DNA sequence
  source 1..336: mol_type = other DNA
gacatcgtgctgacccagtctccactgagcctgcctgttacacctggcgagccagcctccatctcctgcagatcctctaagtccctgctgtacaaggacggcaagacctacctgaactggttcctgcagaagcccggccagtctcctcagctcctgatctacctgatgagcacccatgcctctggcgtgcccgatagattttccggctctggctctggcaccgacttcaccctgaagatctccagagtggaagccgaggacgtgggcgtgtactactgtcagcagctggtggactaccctctgacctttggcggcggaacaaagctggaaatcaag

SEQ ID NO: 622 - DNA, 336 bp, synthetic construct
  misc_feature 1..336: note = TB006 VL DNA sequence
  source 1..336: mol_type = other DNA
gatatagtgatgacccaaacacctttgtccctgtcagtcaccccaggccaacccgcatctatctcatgcaaatcctcaaaaagtcttttgcactctgacgggataacatatctctactggtatcttcaaaaacctggtcagtccccccagctcttgatctatagaatgagtaaccttgcctctggtgtccccgaccggtttagtggaagcgggtctgggaccgacttcaccctcaagattagtcgcgtcgaagccgaagatgtgggagtgtattactgtgcccagatgctcgaatttcccctgacatttggtcaaggaactaaattggagattaag

SEQ ID NO: 623 - DNA, 321 bp, synthetic construct
  misc_feature 1..321: note = 12G5.D7 VL DNA sequence
  source 1..321: mol_type = other DNA
gacatcctgatgacccaatctccatcctccatgtctgtatctctgggagacacagtcagcatcacttgccatgcaagtcagggcattaactctaatatggggtggttgcagcagaaaccagggaaatcatttaagggcctgatctatcatgcaaccaacttggaagatggagttccatcaaggttcagtggcagtggatctggagcagattattctctcaccatcagcagcctggaatctgaagattttgcagactattactgtgtacagtatgctcagtttcctcctacgttcggatcggggaccaagctggaaataaaa

SEQ ID NO: 624 - DNA, 336 bp, synthetic construct
  misc_feature 1..336: note = 13A12.2E5 VL DNA sequence
  source 1..336: mol_type = other DNA
gatgttgtgatgacccagactccactcactttgtcggttgccattggacaaccagcttccatctcttgcaagtcgagtcagagcctcttatatactaatggaaaaacctatttgaattggttattacagaggccaggccagtctccaaaacgcctaatctatctgctgtctaaattggactctggagtccctgacaggttcagtgccagtggatcagggacagatttcacactgaaaatcagcagagtggaggctgaggatttgggagtttattactgcttgcagagtacacattttccgctcacgttcggtgctgggaccaagctggagatgaaa

SEQ ID NO: 625 - DNA, 336 bp, synthetic construct
  misc_feature 1..336: note = 14H10.2C9 VL DNA sequence
  source 1..336: mol_type = other DNA
gatgttgtgatgacccagactccactcactttgtcggttaccattggacaaccagcctccatctcttgcaagtcaagtcagagcctcttcgatagtgatggaaagacatatttgaattggttgttacagaggccaggccagtctccaaagcgcctaatctatctggtgtctaaactggactctggagtccctgacaggttcactggcagtggatcagggacagatttcacactgaaaatcagcagagtggaggctgaggatttgggagtttattattgctggcaaggtacacattttcctctcacgttcggtgctgggaccaagctggaaatgaaa

SEQ ID NO: 626 - DNA, 336 bp, synthetic construct
  misc_feature 1..336: note = 15F10.2D6 VL DNA sequence
  source 1..336: mol_type = other DNA
gatgttttgatgacccaaactccactctccctgcctgtcagtcttggagatcaagcctccatctcttgcagatctagtcagagcattgtacataataatggaaacacctatttagaatggtacctgcagaaaccaggccagtctccaaaactcctgatctacaaagtttccaaccgattttctggggtcccagacaggttcagtggcagtggatcagggacagatttcacactcaagatcagcagagtggaggctgaggatctgggagtttattactgctttcaaggttcacatgttccgctcacgttcggtggtgggaccaagttggagctgaaa

SEQ ID NO: 627 - DNA, 321 bp, synthetic construct
  misc_feature 1..321: note = 19B5.2E6 VL DNA sequence
  source 1..321: mol_type = other DNA
gatatacaaatgactcaaactacctcttctctttccgcatctttgggtgatcgggtcactatatcctgctccgcctctcaaggcataaacaattacctgaattggtatcagcaaaaaccagacggaactgtaaaattgcttatctactacgcttcaagtctgcatagtggggttcccagcagattttccggttccgggtccggcactgattattctctcacaattagtaacctggaacctgaggacattgcaacttattactgtcaacaatacagtcaggtaccttacactttcggatcaggaacaaagttggaaatcaag

SEQ ID NO: 628 - DNA, 321 bp, synthetic construct
  misc_feature 1..321: note = 20D11.2C6 VL DNA sequence
  source 1..321: mol_type = other DNA
gacatccagatgaaccagtctccatccagtctgtctgcatccctcggagacacaattaccatcacttgccgtgccagtcagaacatttatatttggttaagttggtaccagcagaaaccaggaaatattcctaaactcttgatctataaggcttccaacttgcacacaggcgtcccatcaaggtttagtggcagtggatctggaacagatttcacattaaccatcagcactctgcagcctgaagacattgccacttacttctgtctccagggtcaaagttatcctctcacgttcggtgctgggaccaagctggagatgaaa

SEQ ID NO: 629 - DNA, 321 bp, synthetic construct
  misc_feature 1..321: note = 20H5.A3 VL DNA sequence
  source 1..321: mol_type = other DNA
gatatccagatgacacagactacatcctccctgtctgcctctctgggagacagagtcaccatcaattgcagtgcaagtcaggacattagcaattatttaaactggtatcagcagaaaccagatggaactgttaaactcctgatctattacacatcaagtttactctcaggagtcccatcaaggttcagtggcagtgggtctgggacagattattctctcaccatcagcaacctggaacctgaagatattgccacttacttttgtcagcaatatagtaagcttccctatacgttcggatcggggacccacctggaaataaaa

SEQ ID NO: 630 - DNA, 321 bp, synthetic construct
  misc_feature 1..321: note = 23H9.2E4 VL DNA sequence
  source 1..321: mol_type = other DNA
gatatccagatgacacagactacatcctccctgtctgcctctctgggagacagagtcaccatcagttgcagtgcaagtcagggcattaacaattatttaaactggtatcagcagaaaccagatggaactgttaaactcctgatctattacgcatcaagtttacactcaggagtcccatcaaggttcagtggcagtgggtctgggacagattattctctcaccatcagcaacctggaacctgaagatattgccacttactattgtcagcagtatagtcaggttccgtatacgttcggatcggggaccaagttggaaataaaa

SEQ ID NO: 631 - DNA, 336 bp, synthetic construct
  misc_feature 1..336: note = 2D10-VH0-VL0 VL DNA sequence
  source 1..336: mol_type = other DNA
gacatagtaatgacacaggccgcatttagcaatccagtaaccttgggcacatccgcctccatatcttgcaggtcatccaaaagcttgctgcactctgacggtattacttacctgtactggtatttgcagcgacctgggcaatcccctcaactcctgatttaccgcatgagcaacctggcctcaggggtgcctgaccgcttttcaggatcagggagcggcactgacttcaccttgcgaatcagcagagtagaagcagaggatgttggagtttactactgtgcccagatgatcgaatttccacttacttttggggccgggaccattctggagcttaaa

SEQ ID NO: 632 - DNA, 336 bp, synthetic construct
  misc_feature 1..336: note = 3B11.2G2 VL DNA sequence
  source 1..336: mol_type = other DNA
gatgttgtgatgacccagactccactcactttgtcggttgccattggacaaccagcttccatctcttgcaagtcgagtcagagcctcttatatactaatggaaaaacctatttgaattggttattacagaggccaggccagtctccaaaacgcctaatctatctggtgtctaaattggactctggagtccctgacaggttcagtggcagtggatcagggacagatttcacactgaaaatcagcagagtggaggctgaggatttgggagtttattactgcttgcagagtacacattttccgctcacgttcggtgctgggaccaagctggagctgaaa

SEQ ID NO: 633 - DNA, 336 bp, synthetic construct
  misc_feature 1..336: note = 7D8.2D8 VL DNA sequence
  source 1..336: mol_type = other DNA
gatgttttgatgacccaaactccactctccctgcctgtcagtcttggagatcaagcctccatctcttgcagatctagtcagagcattgtacatagtaatggaaacacctatttagaatggtacctgcagaaaccaggccagtctccaaagctcctgatctacaaagtttccaaccgattttctggggtcccagacaggttcagtggcagtggatcagggacagatttcacactcaagatcagcagagtggaggctgaggatctgggagtttattactgctttcaaggttcacatgttccgctcacgttcggtgctgggaccaagctggagctgaaa

SEQ ID NO: 634 - DNA, 336 bp, synthetic construct
  misc_feature 1..336: note = mIMT001 VL DNA sequence
  source 1..336: mol_type = other DNA
gatattgttattactcaggatgagcttagtaatcctgtcactagcggggaaagtgttagtatcagttgtcgttcatccaagtcactcctctacaaagacggcaagacttatctcaactggtttcttcaacgacccggtcaatctccacagctcctgatttacctgatgtcaactcacgcttctggtgttagcgaccgtttctccggaagtggctccgggacagacttcactcttgaaatctcacgtgtaaaagcagaggacgtaggtgtctattattgtcaacagcttgtggactaccccttgacctttggcgctggcacaaagctggaactgaag

SEQ ID NO: 635 - DNA, 336 bp, synthetic construct
  misc_feature 1..336: note = 4A11.2B5 VL DNA sequence
  source 1..336: mol_type = other DNA
gacattgtgatgactcaggcagccttttccaaccctgtaacacttggaactagtgcctccatctcatgccgttccagcaagagtcttttgcacagcgatgggataacctatctctattggtatctgcaacgacccggtcagtcaccccaacttcttatctatcgaatgtctaacttggcctccggcgtgcccgaccgcttttccgggagtgggagcggtacagatttcaccttgcgaatttcccgggttgaggcagaggacgtaggtgtctactattgtgctcagatgcttgagtttcctctcactttcggagccggcaccaaactggaactgaaa

SEQ ID NO: 636 - DNA, 336 bp, synthetic construct; identical to SEQ ID NO: 622
  misc_feature 1..336: note = 4A11.H1L1 VL DNA sequence
  source 1..336: mol_type = other DNA

SEQ ID NO: 637 - DNA, 336 bp, synthetic construct
  misc_feature 1..336: note = 4A11.H4L2 VL DNA sequence
  source 1..336: mol_type = other DNA
gatattgtaatgacccaaagccccctgtccttgcctgttaccccaggtgagcctgccagcatatcttgccgatccagtaaatctctgcttcatagcgatggcatcacctatttgtattggtatttgcagaagcccggccagagcccccagttgctgatctacagaatgtccaaccttgctagtggagtgcccgaccggtttagcggttcaggctcagggactgatttcactcttaaaatcagtagggtagaggccgaagacgttggtgtatattattgtgctcagatgttggagtttccactcacatttggacaaggtacaaagctggaaattaag

SEQ ID NO: 638 - DNA, 336 bp, synthetic construct
  misc_feature 1..336: note = 4G2.2G6 VL DNA sequence
  source 1..336: mol_type = other DNA
gatgtcgtaatgactcaaacccccctgacccttagtgttactataggccagcccgcaagcatctcctgcaaatcctcccagtctcttctttatactgatggcaaaacctacttgtcctggtttttgcagcgcccaggtcaaagtcctaaacgtcttatttacttggtctctaaactcgattccggcgtgcctgaccggttctccggtagcggtagcggtaccgatttcactttgaagattagccgagttgaggcagaagacctcggggtctactactgccttcagagtacacacttcccacttacatttggcgcaggaaccaagttggaggttaaa

SEQ ID NO: 639 - DNA, 321 bp, synthetic construct
  misc_feature 1..321: note = 6B3.2D3 VL DNA sequence
  source 1..321: mol_type = other DNA
agtattgtgatgacccagactcccaaattcctgcttgtatcagcaggagacagggttaccataacctgcaaggccagtcagagtgtgagtaatgatgtagcttggtaccaacagaagccagggcagtctcctaaattgttgatatattatgcatccaatcgctacactggagtccctgatcgcttcactggcagtggatatgggacggatttcactttcaccatcagcactgtgcaggctgaagacctggcagtttatttctgtcagcaggattatacctctccgtacacgttcggaggggggaccaagctggaaataaaa

SEQ ID NO: 640 - DNA, 321 bp, synthetic construct
  misc_feature 1..321: note = 6H6.2D6 VL DNA sequence
  source 1..321: mol_type = other DNA
gacatccagatgacccagaccacctcctccctgtccgcctccctgggcgacagggtgaccatctcctgctccgcctcccagggcatctccaactacctgaactggtaccagcagaagcccgacggcaccgtgaagctgctgatctactacacctcctccctgcactccggcgtgccctccaggttctccggctccggctccggcaccgactactccctgaccatctccaacctggagcccgaggacatcgccacctactactgccagcagtactccgagctgccctacaccttcggctccggcaccaagctggagatcaag

SEQ ID NO: 641 - DNA, 321 bp, synthetic construct
  misc_feature 1..321: note = 9H2.2H10 VL DNA sequence
  source 1..321: mol_type = other DNA
gacattgtgatgacccagtctcacaaattcatgtccacatcagtaggagacagggtcagcatcacctgcaaggccagtcaggatgtgagtactgctgtagcctggtatcaacaaaaaccagggcaatctcctaaactactgatttactgggcatccacccggcacactggagtccctgatcgcttcacaggcagtggatctgggacagattatactctcaccatcagcagtgtgcaggctgaagacctggcactttattactgtcagcaacattataccactccgctcacgttcggtgctgggaccaagctggagctgaaa

SEQ ID NO: 642 - DNA, 321 bp, synthetic construct
  misc_feature 1..321: note = 13G4.2F8 VL DNA sequence
  source 1..321: mol_type = other DNA
gacattgtgatgacccagtctcaaaaattcatgtccacatcagtaggagagagggtcagcatcacctgcaaggccagtcagaatgtaggtactaatgtagcctggtatcagcagaaagcagggcagtctcttgaactgctgatctatggggcatccaaccggcacactggagtccctgatcgcttcacaggcagtggatctgggacagatttcactctcaccatcaccaatgtgcagtctgaagacatgacaaattatttctgtgagcaatatagcaactttcctctcacgttcggtgctgggaccaagctggagctgaaa

SEQ ID NO: 643 - DNA, 336 bp, synthetic construct
  misc_feature 1..336: note = 13H12.2F8 VL DNA sequence
  source 1..336: mol_type = other DNA
gacgttgttatgacacaaacaccacttacactttctgtaactatcggtcagcctgcctcaatttcatgtaagtcttctcagtccctgtttcatagcgacgggaagacttacctgaattggcttctccaacgaccaggccaatcacccaagcgccttatttatttggtcagtaaattggacagtggagttcccgatagatttaccgggagcggttctgggaccgatttcaccccaaagatctccagggtagaagacgaagatctcggtgtgtactattgctggcaggggacacatttccctctgacattcggtgctggaaccaaacttgagatgaaa

SEQ ID NO: 644 - DNA, 321 bp, synthetic construct
  misc_feature 1..321: note = 15G7.2A7 VL DNA sequence
  source 1..321: mol_type = other DNA
gacatccagatgaaccagtctccatccagtctgtctgcatccctcggagacacaatttccatcacttgccgtgccagtcagaacattaatatttggttaagctggtaccagcagaaaccaggaaatattcctcaactattgatctataaggcttccaacttgcacacaggcgtcccctcaaggtttagtggcagtggatctggaacagatttcacattaaccatcagcagtctgcagcctgaagacattgccacttactactgtctacagggtcaaagttatcctctcacgttcggtgctgggaccaagctggtgatgaaa

SEQ ID NO: 645 - DNA, 330 bp, synthetic construct
  misc_feature 1..330: note = 19D9.2E5 VL DNA sequence
  source 1..330: mol_type = other DNA
gatgttgtgatgacccagactccactcactttgtcggttaccattggacaaccagcctccatctcttgtaagtcaagtcagagcctcttacatagtgatggaaagacatatttgaattggttgttacagaggccaggccagcctccaaagcgcctaatgtatctggtgtctacactggactctggagtccctgacaggttcactggcagtggatcagggacagatttcacactgaaaatcagcagagtggaggctgaggatttgggagtttattattgctggcaaggtacacattttcctctcacgttcggtgctgggaccaagccggag

SEQ ID NO: 646 - DNA, 330 bp, synthetic construct
  misc_feature 1..330: note = 23B10.2B12 VL DNA sequence
  source 1..330: mol_type = other DNA
gatattgtgatgacgcaggctgcattctccaatccagtcactcttggaacgtcagcttccatctcctgcaggtctagtaagagtctcctacatagtgatggcatcacttatttctattggtatctgcagaggccaggccagtctcctcagctcctgatatatcggatgtccaaccttgcctcaggagtcccagacaggttcagtggcagtgggtcaggaactgatttcacactgagaatcagcagagtggaggctgaggatgtgggtgtttattactgtgctcaaatgctagaattcccgctcacgttcggtgctgggaccaagctggag

SEQ ID NO: 647 - DNA, 321 bp, synthetic construct
  misc_feature 1..321: note = 24D12.2H9 VL DNA sequence
  source 1..321: mol_type = other DNA
gacattgtgatgacccagtctcacaaattcatgtccacatcagtaggagacagggtcagcatcacctgcaaggccagtcaggatgtgcgtactgctgtagcctggtatcaacagaaaccagggcaatctcctaaactactgatttactgggcatccacccggcacactggagtccctgatcgcttcacaggcagtggatctgggacagatttcactctcacccttagcaatgtgcagtctgaagacttggcagattatttctgtcagcaatatagtagttatccgtggacgttcggtggaggcaccaagctggaaatcaaa

SEQ ID NO: 648 - DNA, 336 bp, synthetic construct
  misc_feature 1..336: note = F846C.1B2 VL DNA sequence
  source 1..336: mol_type = other DNA
aacatttggttgacacagtcgccatcatctctggctgtgtctgcaggagaaatggtcactatgacctgtaagtccagtcaaagtgttttatacagttcaaatcagaagaactacttggcctggtaccagcagaaaccagggcagtctcctaaactgctgatctactgggcatccactagggaatctggtgtccctgatcgcttcacaggcagtggatctgggacagacttttctcttaccatcagcagtgtacaagctgaagacctggcagtttattactgtcatcaatatctctcctcgctcacgttcggtgctgggaccaagctggagctgaaa

SEQ ID NO: 649 - DNA, 336 bp, synthetic construct
  misc_feature 1..336: note = F846C.1F5 VL DNA sequence
  source 1..336: mol_type = other DNA
aacattatgatgacacagtcgccatcatctctggctgtgtctgcaggagaaaaggtcactatgagctgtaagtccagtcaaagtgttttatacagttcaaatcagaagaactacttggcctggtaccagcagaaaccagggcagtctcctaaactgctgatctactgggcatccactagggaatctggtgtccctgatcgcttcacaggcagtggatctgggacagattttactcttaccatcagcagtgtacaacctgaagacctggcagtttattactgtcatcaatacctctcctcgctcacgttcggtgctgggaccaagctggagctgaaa

SEQ ID NO: 650 - DNA, 336 bp, synthetic construct
  misc_feature 1..336: note = F846C.1H12 VL DNA sequence
  source 1..336: mol_type = other DNA
aacattatgatgacacagtcgccatcatctctggctgtgtctgcaggacaaaaggtcactatgagctgtaagtccagtcaaagtgttttatacagttcaagtcagaagaactacttggcctggtaccagcagaaaccagggcagtctcctaaacttctgatctactgggcatccactagggaatctggtgtccctgatcgcttctcaggcagtggatctgggacagattttactcttaccatcagcagtgtacaacctgaagacctggcagtttattactgtcatcaatacctctcctcgctcacgttcggtgctgggaccaagctggagctgaaa

SEQ ID NO: 651 - DNA, 336 bp, synthetic construct
  misc_feature 1..336: note = F846C.1H5 VL DNA sequence
  source 1..336: mol_type = other DNA
gatgttgtgatgacccaaactccactctccctgcctgtcagtcttggagatcaagcctccatctcttgcagatctagtcagagccttgtacacaatagtggaaacacctatttacattggtacctgcagaggccaggccagtctccaaacctcctgatctacaaagtttccaaccgattttctggggtcccagacaggttcagtggcagtggatcagggacagatttcacactcaagatcagcagagtggcggctgaggatctgggagtttatttctgctctcaaagtacacatgttcctccgacgttcggtggaggcaccaagctggaaatcaaa

SEQ ID NO: 652 - DNA, 336 bp, synthetic construct; identical to SEQ ID NO: 649
  misc_feature 1..336: note = F846C.2H3 VL DNA sequence
  source 1..336: mol_type = other DNA

SEQ ID NO: 653 - DNA, 327 bp, synthetic construct
  misc_feature 1..327: note = F846TC.14A2 VL DNA sequence
  source 1..327: mol_type = other DNA
caggctgttgtgactcaggaatctgcactcaccacatcacctggtgaaacagtcacactcacttgtcgctcaagtactggggctgttacaactagtaactatgccaactgggtccaagaaaaaccagatcatttattcactggtctaataggtggtatcaataaccgagttccaggtgttcctgccagattctcaggctccctgattggagacaaggcagccctcaccatcacaggggcacagactgaggatgaggcaatatatttctgtgctctatggtatagcaaccattgggtgttcggtggaggaaccaaactgactgtccta

SEQ ID NO: 654 - DNA, 336 bp, synthetic construct
  misc_feature 1..336: note = F846TC.14E4 VL DNA sequence
  source 1..336: mol_type = other DNA
gatattgtgatgacgcaggctgcattctccaatccagtcactcttggaacatcagcttccatctcctgcaggtctagtaagagtctcctacatactaatggcatcacttttttgtattggtatctgcagaagccaggccagtctcctcagcccctgatttatcagatgtccaaccttgcctcaggagtcccagacaggttcagtagcagtgggtcaggaactgatttcacactgagaatcagcagagtggaggctgaggatgtgggtgtttattactgtgctcaaaatctagaacttccttggacgttcggtggaggcaccaagctggaaatcaat

SEQ ID NO: 655 - DNA, 336 bp, synthetic construct
  misc_feature 1..336: note = F846TC.16B5 VL DNA sequence
  source 1..336: mol_type = other DNA
aacattatgatgacacagtcgccatcatctctggctgtgtctgcaggagaaaaggtcactatgagctgtaagtccagtcaaagtgttttatacagttcaaatcagaagaactacttggcctggtaccagcagaaaccagggcagtctcctaaactactgatctactgggcatccactagggaatctggtgtccctgatcgcttcacaggcagtggatctgggacagattttactcttaccatcagcagtgtacaagctgaagacctggcagtttattactgtcatcaatacctctcctcgctcacgttcggtgctgggaccaagctggagctgaaa

SEQ ID NO: 656 - DNA, 339 bp, synthetic construct
  misc_feature 1..339: note = F846TC.7F10 VL DNA sequence
  source 1..339: mol_type = other DNA
gacattgtgatgacacagtctccatcctccctggctatgtcagtaggacagaaggtcactatgagctgcaagtccagtcagagccttttaaatagtagcaatcaaaagaactatttggcctggtaccagcagaaaccaggacagtctcctaaacttctggtatactttgcatccactagggaatctggggtccctgatcgcttcataggcagtggatctgggacagatttcactcttaccatcagcagtgtgcaggctgaagacctggcagattacttctgtcagcaacattatagcactccgtacacgttcggagggggggccaagctggaaataaaa

SEQ ID NO: 657 - DNA, 321 bp, synthetic construct
  misc_feature 1..321: note = F847C.10B9 VL DNA sequence
  source 1..321: mol_type = other DNA
gacatccggatgactcagtctccatccagtctgtctgcatcccttggagacacaattaccatcacttgccatgccagtcagaacattaatgtttggttaagctggtaccagcagaaaccaggaaatattcctaaactattgatctataaggcttccaacttgcacacaggcgtcccatcaaggtttagtggcagtggatctggaacaggtttcacattaaccatcagcagcctgcagcctgaagacattgccacttactactgtcaacagggtcaaagttatccgtacacgttcggaggggggaccaagctggagctgaaa

SEQ ID NO: 658 - DNA, 321 bp, synthetic construct
  misc_feature 1..321: note = F847C.11B1 VL DNA sequence
  source 1..321: mol_type = other DNA
gaaattgtgttgacccagtctccagcatccctgtccgtgactacaggagaaaaagtcactatcagatgcataaccagcattgatattgatgatgatatgaactggtaccagcagaagccaggggaacctcctaagctccttatttcagaaggcaatactcttcgtcctggagtcccatcccgattctccagcagtggctatggcacagattttgtttttacaattgaaaacacgctctcagaagatgttgcagattactactgtttgcaaagtgataacaagcctctcacgttcggtgctgggaccaagctggagctgaaa

SEQ ID NO: 659 - DNA, 321 bp, synthetic construct
  misc_feature 1..321: note = F847C.12F12 VL DNA sequence
  source 1..321: mol_type = other DNA
gacatccaggtgattcagtctccatccagtctgtctgcatcccttggagacacaattaccatcacttgccatgccagtcagaacattaatgtttggttaagctggtaccagcagaaaccaggaaatattcctaaactattgatctataaggcttccaacttgcacacaggcgtcccatcaaggtttagtggcagtggatctggaacaggtttcacattaaccatcagcagcctgcagcctgaagacattgccacttactactgtcaacagggtcaaagttatccgtacacgttcggaggggggaccaagctggagctgaaa

SEQ ID NO: 660 - DNA, 321 bp, synthetic construct
  misc_feature 1..321: note = F847C.26F5 VL DNA sequence
  source 1..321: mol_type = other DNA
gaaattaagatgaaccagtctccatccagtctgtctgcatcccttggagacacaattaccatcacttgccatgccagtcagaacattaatgtttggttaagctggtaccagcagaaaccaggaaatattcctaaactattgatctataaggcttccaacttgcacacaggcgtcccatcaaggtttagtggcagtggatctggaacaggtttcacattaaccatcagcagcctacagcctgaagacattgccacttactactgtcaacagggtcaaagttatccgtacacgttcggaggggggaccaagctggagctgaaa

SEQ ID NO: 661 - DNA, 327 bp, synthetic construct
  misc_feature 1..327: note = F847C.4B10 VL DNA sequence
  source 1..327: mol_type = other DNA
caggctgttgtgactcaggaatctgcactcaccacatcacctggtgaaacagtcacactcacttgtcgctcaagtactggggctgttacaactagtaactatgccaactgggtccaagaaaaaccagatcatttattcactggtctaataggtggtaccaacaaccgagctccaggtgttcctgccagattctcaggctccctgattggagacaaggctgccctcaccatcacaggggcacagactgaggatgaggcaatatatttctgtgctctatggtacagcaaccatttagtgttcggtggaggaaccaaactgactgtccta

SEQ ID NO: 662 - DNA, 336 bp, synthetic construct
  misc_feature 1..336: note = F849C.8D10 VL DNA sequence
  source 1..336: mol_type = other DNA
gatgttttgatgacccaaactccactctccctgcctgtcagtcttggagatcaagcctccatctcttgcagatctagtcaggacattgtgcatagtagtggaaacacctatttagaatggtacctgcagaaaccaggccagtctctaaagctcctgatttacaaagtttccaaccgattttctggggtcccagacaggttcagtgccagtggatcagggacagatttcacactcaagatcagcagagtggaggctgaggatctgggagtttattactgctttcaaggttcacatgttcctcccacgttcggctcggggacaaagttggaaataaaa

SEQ ID NO: 663 - DNA, 336 bp, synthetic construct
  misc_feature 1..336: note = F849C.8H3 VL DNA sequence
  source 1..336: mol_type = other DNA
gatattgggatgaggcaggctgcattctccaatccagtcactcttggaacatcagcttccatctcctgcaggtctagtaagagtctcctatatagtaatggcatcacttatttgtattggtttctccagaagccaggccagtctcctcagctcctgatttatcagatgtccaaccttgcctcaggagtcccagacaggttcagtagcagtgggtcaggaactgatttcacactgagaatcagcagagtggaggctgacgatgtgggtgtttattactgtgctcaaaatctagaacttccgtggacgttcggtggaggcaccaagctggaaatcaaa

SEQ ID NO: 664 - DNA, 333 bp, synthetic construct
  misc_feature 1..333: note = 846.2B11 VL DNA sequence
  source 1..333: mol_type = other DNA
gacattgtgctgacacagtctcctgcttccttaggtgtttctctggggcagagggccaccatctcatgcagggccagcaaaagtgtcagtacatctggctatagttatatgcactggtaccaacagaaaccaggacagccacccaaactcctcatctatcttgcatccatcctagaatctggggtccctgccaggttcagtggcagtgggtctgggacagacttcaccctcaacatccatcctgtggaggaggaggatgctgcaatctattactgtcagcacagtagggagcttcctctcacgttcggtgctgggaccaagctggagctgaaa

SEQ ID NO: 665 - DNA, 333 bp, synthetic construct
  misc_feature 1..333: note = 846.4D5 VL DNA sequence
  source 1..333: mol_type = other DNA
aacattgtgctgacccaatctccagcttctttggctgtgtctctagggcagagggccaccatatcctgcagagccagtgaaagtgttgatagttatggcaatagttttatgcactggtaccagcagaaaccaggacagccacccaaactcctcatctatcttgcatccaacctagaatctggggtccctgccaggttcagtggcagtgggtctaggacagacttcaccctcaccattgatcctgtggaggctgatgatgctgcaacctattactgtcagcaaaataatgaggatccgtggacgttcggtggaggcaccaagctggaaatcaaa

SEQ ID NO: 666 - DNA, 336 bp, synthetic construct
  misc_feature 1..336: note = 846T.1H2 VL DNA sequence
  source 1..336: mol_type = other DNA
gatgttgtgatgacccagactccactcactttgtcggttaccattggacaaccagcctctatctcttgcaagtcaagtcagagtctcttatatagtaatggaaaaacctatttgaattggttattacagaggccaggccagtctccaaagcgcctaatctatctggtgtctaaactggactctggagtccctgacaggttcactggcagtggatcaggaacagattttacactgaaaatcagcagagtggaggctgaggatttgggagtttattactgcgtgcaaggtacacattttcctcagacgttcggtggaggcaccaagctggaaataaaa

SEQ ID NO: 667 - DNA, 327 bp, synthetic construct; identical to SEQ ID NO: 661
  misc_feature 1..327: note = 847.14H4 VL DNA sequence
  source 1..327: mol_type = other DNA

SEQ ID NO: 668 - DNA, 333 bp, synthetic construct
  misc_feature 1..333: note = 846.2D4 VL DNA sequence
  source 1..333: mol_type = other DNA
aacattgtgctcacccaatctccagcttctttggctgtgtctctagggcagagggccaccatatcctgcagagccagtgaaagtgttgatagttatggcaatagttttatgcactggtaccagcagaaaccaggacagccacccaaactcctcatctatcttgcatccaacctagaatctggggtccctgccaggttcagtggcagtgggtctaggacagacttcaccctcaccattgatcctgtggaggctgatgatgctgcaacctattactgtcagcaaaataatgaggatccgtggacgttcggtggaggcaccaagctggaaataaaa

SEQ ID NO: 669 - DNA, 321 bp, synthetic construct
  misc_feature 1..321: note = 846.2F11 VL DNA sequence
  source 1..321: mol_type = other DNA
gacatcctgatgacccaatctccatcctccatgtctgtatctctgggagacacagtcagcatcacttgccatgcaagtcagggcattaacagtaatatagggtggttgcagcagaaaccagggaagtcatttaagggcctgatctatcatggaaccaacttggaagatggagttccatcaaggttcagtggcagtggatctggagcagattattctctcaccatcagcagcctggaatctgaagattttgcggactattactgtgtacagtatgatcagtttccgtggacgttcggtggaggcaccaagctggaaatcaaa

SEQ ID NO: 670 - DNA, 333 bp, synthetic construct
  misc_feature 1..333: note = 846T.10B1 VL DNA sequence
  source 1..333: mol_type = other DNA
gacattgtgatgtcacagtctcctgcttccttaggtgtttctctggggcagagggccaccatctcatgcagggccagcaaaagtgtcagtacatctggctatagttatatgcactggtaccaacagaaaccaggacagccacccaaactcctcatctatcttgcatccatcctagaatctggggtccctgccaggttcagtggcagtgggtctgggacagacttcaccctcaacatccatcctgtggaggaggaggatgctgcaatctattactgtcagcacagtagggagcttcctctcacgttcggtgctgggaccaagctggagctgaaa

SEQ ID NO: 671 - DNA, 333 bp, synthetic construct
  misc_feature 1..333: note = 846T.2E3 VL DNA sequence
  source 1..333: mol_type = other DNA
gacattgtgctgacacagtctcctgcttccttagctgtatctctggggcagagggccaccatctcatgcagggccagcaaaagtgtcagtacatctggctatagttatatgcactggtaccaacagaaaccaggacagccacccaaactcctcatctatcttgcatccatcctagaatctggggtccctgccaggttcagtggcagtgggtctgggacagacttcaccctcaacatccatcctgtggaggaggaggatgctgcaacctattactgtcagcacagtagggagcttcctctcacgttcggtgctgggaccaagctggagctgaaa

SEQ ID NO: 672 - DNA, 321 bp, synthetic construct
  misc_feature 1..321: note = 846T.4C9 VL DNA sequence
  source 1..321: mol_type = other DNA
gacattttgatgacccaaactccatcctccatgtctgtatctctgggagacacagtcagcatcacttgccatgcaagtcagggcattagcagtaatatagggtggttgcagcagaaaccacggaaatcatttaagggcctgatctattatggaaccaacttggaagatggagttccatcaaggttcagtggcagtggatctggagcagattattctctcaccatcagcagcctggaatctgaagattttgcagactattactgtgtacagtatgatcagtttccgtggacgttcggtggaggcaccaagctggaaataaaa

SEQ ID NO: 673 - DNA, 333 bp, synthetic construct
  misc_feature 1..333: note = 846T.4E11 VL DNA sequence
  source 1..333: mol_type = other DNA
gacattgtgctgacacagtctcctgcttccttagctgtatctctggggcagagggccaccatctcatgcagggccagcaaaagtgtcagtacatctggctatagttgtatgcactggtaccaacagaaaccaggacagccacccaaactcctcatctatcttgcatccaacctagaatctggggtccctgccaggttcagtggcggtgggtctgggacagacttcaccctcagcatccatcctgtggaggaggaggatgctgcaacctattactgtcaccacagtacggagcttccgtacacgttcggaggggggaccaagctggaagtagaa

SEQ ID NO: 674 - DNA, 333 bp, synthetic construct
  misc_feature 1..333: note = 846T.4F5 VL DNA sequence
  source 1..333: mol_type = other DNA
gacattgtgctgacccaatctccagcttctttggctgtgtctctagggcagagggccaccatatcctgcagagccagtgaaagtgttgatagttatggcaatagttttatgcactggtaccagcagaaaccaggacagccacccaaactcctcatctatcttgcatccaacctagaatctggggtccctgccaggttcagtggcagtgggtctaggacagacttcaccctcaccattgatcctgtggaggctgatgatgctgcaacctattactgtcagcaaaataatgaggatccgtggacgttcggtggaggcaccaagctggaaatcaaa

SEQ ID NO: 675 - DNA, 324 bp, synthetic construct
  misc_feature 1..324: note = 846T.8D1 VL DNA sequence
  source 1..324: mol_type = other DNA
gacattgtgctgacacagtctcctgcttccttagctgtatctctggggcagagggccaccatctcatgcagggccagcaaaagtgtcagtacatctggctatagttatatgcactggtaccaacagaaaccaggacagccacccaaactcctcatctatcttgcatccatcctagaatctggggtccctgccaggttcagtggcagtgggtctgggacagacttcaccctcaacatccatcctgtggaggaggaggatgctgcaacctattactgtcagcacagtagggagcttcctctcacgttcggtgctgggaccaagctg

SEQ ID NO: 676 - DNA, 333 bp, synthetic construct
  misc_feature 1..333: note = 847.10C9 VL DNA sequence
  source 1..333: mol_type = other DNA
gatgttgtgatgacccagactccactcactttgtcggttaccattggacaaccagcctctatctcttgcaagtcaagtcagagcctcttatatagtgatggaaaaacctatttgaattggttattacagaggccaggccagtctccaaagcgcctaatctatctggtgtctcaactggactctggagtccctgacaggttcactggcagtggatcaggaacagattttacactgaaaatcagcagagtggaggctgatgatttgggagtttattgctgcgtgcaaggtacacatcttcccacgttcggaggggggaccaagctggaaataaaa

SEQ ID NO: 677 - DNA, 333 bp, synthetic construct
  misc_feature 1..333: note = 847.11D6 VL DNA sequence
  source 1..333: mol_type = other DNA
gacattgtgatgacacagtctcccgcttctttggctgtgtctctagggcagagggccaccatatcctgcagagccagtgaaagtgttgaaaatcatgtcaatagttttatgcactggttccaacagaaaccaggacagccacccaaactcctcatctatcgtgcatccaacctacaatctgggatccctgccaggttcagtggcagtgggtctaggacagacttcaccctcaccattaatcctgtggaggctgatgatgttgcaacctattactgtcagcaaaataatgaggtcccgtacacgttcggaggggggaccaagctggaaataaaa

SEQ ID NO: 678 - DNA, 327 bp, synthetic construct
  misc_feature 1..327: note = 847.15D12 VL DNA sequence
  source 1..327: mol_type = other DNA
caggctgttgtgactcaggaatctgcactcaccacatcacctggtgaaacagtcacactcacttgtcgctcaagtactggggctgttacaactagtaactatgccaactgggtccaagaaaaaccagatcatttattcactggtctaataggtggtaccaacaaccgagctccaggtgttcctgccagattctcaggctccctgattggagacaaggctgccctcaccatcacaggggcacagactgaggatgaggcaatatatttctgtgctctatggtacagcaaccatttggtgttcggtggaggaaccaaactgactgtccta

SEQ ID NO: 679 - DNA, 318 bp, synthetic construct
  misc_feature 1..318: note = 847.15F9 VL DNA sequence
  source 1..318: mol_type = other DNA
caaattgttctctcccagtctccagcaatcctgtctgcatctccaggggagaaggtcacaatgacttgcagggccagctcaagtgtaacttacatgtactggtaccagcagaagccaggatcctccccccaaccctggatttatgccacatccaacctggcttctggagtccctgctcgcttcagtggcagtgggtctgggacctcttactctctcacaatcagcagagtggaggctgaagatgctgccacttattactgccagcagtggagtagtaacccactcacgttcggtgctgggaccaagctggagctgaaa

SEQ ID NO: 680 - DNA, 333 bp, synthetic construct
  misc_feature 1..333: note = 847.15H11 VL DNA sequence
  source 1..333: mol_type = other DNA
gacattgtgctaacacagtctccagcttctttggctgtgtctctagggcagagggccaccatctcctgcagagccagcgaaagtcttgataattctggcattagttttatgaactggttccaacagagaccaggacagccacccaaactcctcatctatgctgcatccaacctagaatccggggtccctgccaggtttagtggcagtgggtctgggacagacttcagcctcaacatccatcctatggaggaggatgatgctgcaatgtatttctgtcagcacagtaaggaggttccgtggacgttcggtggaggcaccaagctggaaatcaaa

SEQ ID NO: 681 - DNA, 321 bp, synthetic construct
  misc_feature 1..321: note = 847.20H7 VL DNA sequence
  source 1..321: mol_type = other DNA
gacattgtgatgacccagtctcacaaaatcatgtccacatcagtaggagacagggtcagcatcacctgcaaggccagtcaggatgtgagtaccactgtggcctggtttcagcaaaaaccaggacaatctcctaaactactgctttactgggcatccacccggcacactggagtccctgatcgcttcacaggcagtggatctgggacagattatactctcaccatcagcagtgtccaggctgaagacctggcactttattactgtcagcaacattatagccctccattcacgttcggctcggggaccaagctggaaataaaa

SEQ ID NO: 682 - DNA, 321 bp, synthetic construct
  misc_feature 1..321: note = 847.21B11 VL DNA sequence
  source 1..321: mol_type = other DNA
gacattgtgatgactcagtctcaaaaattcatgtccacatcagtaggagacagggtcagcgtcacctgcaaggccagtcagaatgtgggtattaatgtagcctggtatcaacagaaaccagggcaatctcctaaagcactgatttactcggcatcctaccggtacagtggagtccctgatcgcttcacaggcagtggatctgggacagatttcactctcaccatcagcaatgtgcagtctgaagacttggcagagtatttctgtcagcaatataatagttatccgtacacgttcggaggggggaccaagctggaaatgaaa

SEQ ID NO: 683 - DNA, 336 bp, synthetic construct
  misc_feature 1..336: note = 847.27B9 VL DNA sequence
  source 1..336: mol_type = other DNA
gacgttgtgatgacccagactccactcactttgtcggttacccttggacaacccgcctccatctcttgcaggtcaagtcagagcctcttagatagtgatggaaagacatatttgaattggttgttacagaggccaggccagtctccaaagcgcctaatctatttggtgtctagactggactctggagtccctgacaggttcactggcagtggatcagggacagatttcacactgaaaatcagcagagtggaggctgaggatctgggagtttattattgctggcaaggtacacattttccgttcacgttcggaggggggaccaagctggaaataaaa

SEQ ID NO: 684 - DNA, 321 bp, synthetic construct
  misc_feature 1..321: note = 847.28D1 VL DNA sequence
  source 1..321: mol_type = other DNA
gacatccggatgactcagtctccagcctccctatctgcatctgtgggagaaactgtcaccatcacatgtcgagcaagtgggaatattcacaattatttagcatggtatcatcagaaacagggaaaatctcctcagctcctggtctataatgtaaaaaccttagcagatggtgtgccatcaaggttcagtggcagtggatcaggaacacaattttctctcaagatcaacagtttgcagcctgaagattttgggacttattattgtcaacatttttggagtatttttccgacgttcggtggaggcaccaagctggaaataaaa

SEQ ID NO: 685 - DNA, 318 bp, synthetic construct
  misc_feature 1..318: note = 847.2B8 VL DNA sequence
  source 1..318: mol_type = other DNA
caaattcttctctcccagtctccagcaatcctgtctgcatctccaggggagaaggtcacaatgacttgcagggccagctcaagtgtaacttacatgtactggtaccagcagaagccaggatcctccccccaaccctggatttatgccacatccaacctggcttctggagtccctgctcgcttcagtggcagtgggtctgggacctcttactctctcacaatcagcagagtggaggctgaagatgctgccacttattactgccagcagtggagtagtaacccactcacgttcggtgctgggaccaagctggagctgaaa

SEQ ID NO: 686 - DNA, 315 bp, synthetic construct
  misc_feature 1..315: note = 847.3B3 VL DNA sequence
  source 1..315: mol_type = other DNA
gacattttgatgactcagtctccagcctccctatctgcatctgtgggagaaactgtcaccatcacatgtcgagcaagtgggaatattcacaattatttagcatggtatcagcagaaacagggaaaatctcctcaactcctggtctatagtgcaaaaaccttagcagatggtgtgccatcaaggttcagtggcagtggatcaggaacacaattttctctcaagatcgacagcctgcagcctgaagattttgggacttattactgtcaacatttttggagtctttttccgacgttcggtggaggcaccaagctggaa

SEQ ID NO: 687 - DNA, 321 bp, synthetic construct
  misc_feature 1..321: note = 849.1D2 VL DNA sequence
  source 1..321: mol_type = other DNA
gacgttgtgatgacccagactcccaaattcctgcttgtatcagcaggagacagggttaccataacctgcaaggccagtcaaagtgtgagtagtgatgtagcttggtaccaacagaagccagggcagtctcctaaactgctgatatactttgcatccaatcgctacactggagtccctgatcgcttcactggcagtggatatgggacggatttcactttcaccatcagcactgtccaggctgaagacctggcagtttatttctgtcagcataattatatctctccgttcacgttcggaggggggaccaagctggaaataaaa

SEQ ID NO: 688 - DNA, 321 bp, synthetic construct
  misc_feature 1..321: note = 849.2D7 VL DNA sequence
  source 1..321: mol_type = other DNA
gacattgtgatgacccagtctcacaaattcatgtccacatcagtaggagacagggtcagcatcacctgcaaggccagtcaggatgtgagtactgctgtagcctggtatcaacaaaaaccagggcaatctcctaaactactgatttactgggcatccacccggcacactggagtccctgatcgcttcacaggcagtggatctgggacagattatactctcaccatcagcagtgtgcaggctgaagacctggcactttattactgtcagcaacattatagcactccgtacacgttcggaggggggaccaagctggaaataaaa

SEQ ID NO: 689 - DNA, 321 bp, synthetic construct
  misc_feature 1..321: note = 849.2F12 VL DNA sequence
  source 1..321: mol_type = other DNA
gacattgcgatgacccagtctcacaaattcatgtccacatcagtaggagacagggtcagcatcacctgcaaggccagtcaggatgtgagtactgctgtagcctggtatcaacaaaaaccagggcaatctcctaaactactgatttactgggcatccacccggcacactggagtccctgatcgcttcacaggcagtggatctgggacagattatactctcaccatcagcagtgtgcaggctgaagacctggcactttattactgtcagcaacattataacactccgtacacgttcggaggggggaccaagctggaaataaaa

SEQ ID NO: 690 - DNA, 336 bp, synthetic construct
  misc_feature 1..336: note = 849.4B2 VL DNA sequence
  source 1..336: mol_type = other DNA
gatgtggggatgacccagactccactcattttgtcggttaccattggacaaccagcttccatctcttgcaagtcaagtcagagcctcttatatattaatggaaaaacctatttgaattggttattacagaggccaggccagtctccaaaacgcctaatctatctggtgtctaaattggactctggagtccctaacagattcagtggcagtggatcagggacagatttcacactgaaaatcagcagagtggaggctgaggatttgggagtttattactgcttgcagagtacacattttcctcagacgttcggtggaggcaccaagctggaaatcaaa

SEQ ID NO: 691 - DNA, 321 bp, synthetic construct
  misc_feature 1..321: note = 849.4F12 VL DNA sequence
  source 1..321: mol_type = other DNA
gacatcctgctgacccagtctccatcctccatgtctgtatctctgggagacacagtcagcatcacttgccatgcaagtcagggcattaacagtaatatagggtggttgcagcagaaaccagggaagtcatttaagggcctgatctatcatggaaccaacttggaagatggagttccatcaaggttcagtggcagtggatctggagcagattattctctcaccatcagcagcctggaatctgaagattttgcggactattactgtgtacagtatgatcagtttccgtggacgttcggtggaggcaccaagctggaaatcaaa

SEQ ID NO: 692 - DNA, 336 bp, synthetic construct
  misc_feature 1..336: note = 849.4F2 VL DNA sequence
  source 1..336: mol_type = other DNA
gatgttgggatgacccagactccactcattttgtcggttaccattggacaaccagcttccatctcttgcaagtcaagtcagagcctcttatatattaatggaaaaacctatttgaattggttattacagaggccaggccagtctccaaaacgcctaatctatctggtgtctaaattggactctggagtccctaacagattcagtggcagtggatcagggacagatttcacactgaaaatcagcagagtggaggctgaggatttgggagtttattactgcttgcagagtacacattttcctcagacgttcggtggaggcaccaagctggaaatcaaa

SEQ ID NO: 693 - DNA, 336 bp, synthetic construct
  misc_feature 1..336: note = 849.5C2 VL DNA sequence
  source 1..336: mol_type = other DNA
gatattgtgatgactcaggctgcaccctctgtacctgtcactcctggagagtcagtatccatctcctgcaggtctagtaggagtctcctgcatagtaatggctacacttacttgtattggttcctgcagaggccaggccagtctcctcggctcctgatatatcggatgtccaaccttgcctcaggagtcccagacaggttcagtggcagtgggtcaggaactgctttcacactgagaatcagtagagtggaggctgaggatgtgggtgtttattactgtatgcaacatctagaatatccgtacacgttcggaggggggaccaagctggaaataaaa

SEQ ID NO: 694 - DNA, 318 bp, synthetic construct
  misc_feature 1..318: note = 849.8D12 VL DNA sequence
  source 1..318: mol_type = other DNA
gacatccagatgacacagactacatcctccctgtctgcctctctgggagacagagtcaccatcagttgcagtgcaagtcagggcattagcaattatttaaactggtatcagcagaaaccagatggaactgttaaactcctgatctattacacatcaagtttacactcaggagtcccatcaaggttcagtggcagtgggtctgggacagattattctctcaccatcagcaacctggaacctgaagatattgccacttactattgtcagcagtatagtaagcttcctcggacgttcggtggaggcaccaagctggaaatc

SEQ ID NO: 695 - DNA, 336 bp, synthetic construct
  misc_feature 1..336: note = F847C.21H6 VL DNA sequence
  source 1..336: mol_type = other DNA
gatgttgtgatgacccagactccactcactttgtcggttaccattggacaaccagcctccatctcttgcaagtcaagtcggagcctcttagatagtgatggaaagacatatttgaattggttgttacagaggccaggccagtctccaaagcgcctaatctatctggtgtccaaactggactctggagtccctgacaggttcactggcagtggatcagggacagatttcacactgaaaatcagcagagtggaggctgaggatttgggagtttattattgctggcaaggtacacattttcctcagacgttcggtggaggcaccaagctggaaatcaat

SEQ ID NO: 696 - DNA, 321 bp, synthetic construct
  misc_feature 1..321: note = 849.5H1 VL DNA sequence
  source 1..321: mol_type = other DNA
gacatccagatgaaccagtctccatccagtctgtctgcatcccttggagacacaattaccatcacttgccatgccagtcagaacattaatgtttggttaagctggtaccagcagaaaccaggaaatattcctaaactattgatctatcaggcttccaacttacacacaggcgtcccatcaaggtttagtggccgtggatctggaacaggtttcacattaaccatcagcagcctgcagcctgaagacattgccacttactactgtcaacagggtcaaagttctccattcacgttcggctcggggacaaagttggaaataaaa

SEQ ID NO: 697 - DNA, 321 bp, synthetic construct
  misc_feature 1..321: note = 847.23F11 VL DNA sequence
  source 1..321: mol_type = other DNA
gacattttgatgacccagtctcacaaattcatgtccacatcagtaggagacagggtcagcatcacctgcaaggccagtcaggatgtgagttctgttgtagtctggtatcaacaaaaaccaggacaatctcctaaacaactaatttactgggcatccacccggcacactggagtccctgatcgcttcacaggcagtggatctgggacagattatactctcaccatcagcagtgtgcaggctgaagacctggcactttattactgtcagcaacattatagcacgccgtacacgttcggaggggggaccaagctggaaataaaa

SEQ ID NO: 698 - DNA, 327 bp, synthetic construct
  misc_feature 1..327: note = 847.16D10 VL DNA sequence
  source 1..327: mol_type = other DNA
caggctgttgtgactcaggaatctgcactcaccacatcacctggtgaaacagtcacactcacttgtcgctcaagtactggggctgttacaactagtaactatgccaactgggaccaagaaaaaccagatcatttattcactggtctaataggtggtaccaacaaccgagctccaggtgttcctgccagattctcaggctccctgattggagacaaggctgccctcaccatcacaggggcacagactgaggatgaggcaatatatttctgtgctctatggtacagcaaccatttggtgttcggtggaggaaccaaggtcactgtccta

SEQ ID NO: 699 - DNA, 333 bp, synthetic construct
  misc_feature 1..333: note = 847.13E2-mH0mL1 VL DNA sequence
  source 1..333: mol_type = other DNA
gacattgtgatgacacagtctcctgcttccttacctgtatctctggggcagagggccaccatctcatgcagggccagcaaaagtgtcactacatctgcctatagttatatacactggtaccaacagagaccaggacagccacccaaactcctcatctatcttgcatccaacctagaatctggggtccctgccaggttcagtggcagtgggtctgggacagacttcaccctcaacatccatcctgtggaggaggaggatgctgcaacctattactgtcagcacaatagggagcttcctccgacgttcggtggaggcaccaagctggaaatcaat

SEQ ID NO: 700 - DNA, 321 bp, synthetic construct
  misc_feature 1..321: note = 847.13E2-mH0mL2 VL DNA sequence
  source 1..321: mol_type = other DNA
gatattgtgctaactcagtctccagccaccctgtctgtgactccaggagatagcgtcagtttttcctgcagggccagccaaattattaacaacaacctacactggtatcaacaaaaatcacatgagtctcctaggcttctcatcaggtatacttcccagtccatctctgggatcccctccaggttcagtggcagtggatcagggacagatttcactctcagtatcaacaatgtggagactgaagattttggaatgtatttctgtcaacagactaacagctggcctctcacgttcggtgctgggaccaagctggagctgaaa

SEQ ID NO: 701 - DNA, 333 bp, synthetic construct
  misc_feature 1..333: note = 847.12C4 VL DNA sequence
  source 1..333: mol_type = other DNA
gatgttgtgatgacccagactccactcactttgtcggttaccattgaacaaacagcctccatctcttgcaagtcaagtcagagcctcttagatcgtgatggaaagacatatttgaattggttgttacagaggccaggccagtctccaaagcgcctaatctatctggtgtctaaactggactctggagtccctgacaggttcactggcagtggatcagggacagatttcacactgaaaatcagcagagtggaggctgaggatttgggagtttattattgctggcaaggtacacattttccgacgttcggtggaggcaccaagctggaaatcaaa

SEQ ID NO: 702 - DNA, 321 bp, synthetic construct
  misc_feature 1..321: note = 847.4D3 VL DNA sequence
  source 1..321: mol_type = other DNA
gatgttgtgatgacccaaactcccaaattcctgcctataacagcagaagacagggttaccattacctgcaaggccagtcagagtgtgagtaatgaagtagcttggtaccaacagaagccagggcagtctcctaaactgctgatatactatgcatccaatcgctacactggagtccctgatcgcttcactggcagtggatctggcacggatttcactttcaccatcagaagtgtgcaacttgaagacctggcagtttatttctgtcagcagcattatagctctccgtggacgttcggtggaggcaccaagctggaaatcaaa

SEQ ID NO: 703 - DNA, 1332 bp, synthetic construct
  misc_feature 1..1332: note = TB001 heavy chain DNA sequence
  source 1..1332: mol_type = other DNA
caggtgcagctggtgcagtccggctccgagctgaaaaaacccggcgcctccgtgaaagtgtcctgcaaagcctccggctacacattcacaaactacggcatgaactgggtgaggcaggcccccggccagggcctgaaatggatgggctggatcaacacaaacacaggcgagcccacatacgtggaggagttcacaggcaggttcgtgttctccctggagacatccgtgtccacagcctacctgcagatctcctccctgaaagccgaggacacagccgtgtacttctgcgccccctacgacaacttcttcgcctactggggccagggcacaacagtgacagtgtcctccgcttccaccaagggacccagcgtgttccctctggctccttgctccagatccacctccgagtctacagctgctctgggctgcctggtcaaggactactttcctgagcctgtgaccgtgtcctggaactctggcgctctgacatctggcgtgcacacctttccagctgtgctgcagtcctccggcctgtactctctgtcctctgtcgtgaccgtgccttcctctagcctgggcaccaagacctacacctgtaatgtggaccacaagccttccaacaccaaggtggacaagcgcgtggaatctaagtacggccctccttgtcctccatgtcctgctccagagtttctcggcggaccctccgtgttcctgtttcctccaaagcctaaggacaccctgatgatctctcggacccctgaagtgacctgcgtggtggtggatgtgtcccaagaggatcccgaggtgcagttcaattggtacgtggacggcgtggaagtgcacaacgccaagaccaagcctagagaggaacagttcaactccacctacagagtggtgtccgtgctgaccgtgctgcaccaggattggctgaacggcaaagagtacaagtgcaaggtgtccaacaagggcctgccttccagcatcgaaaagaccatctccaaggccaagggccagcctagggaaccccaggtttacaccctgcctccaagccaagaggaaatgaccaagaaccaggtgtccctgacctgcctcgtgaagggcttctacccttccgatatcgccgtggaatgggagagcaatggccagcctgagaacaactacaagacaacccctcctgtgctggactccgacggcagcttcttcctgtattcccgcctgaccgtggacaagtccagatggcaagagggcaacgtgttcagctgctccgtgatgcacgaggccctgcacaatcactacacccagaagtccctgtctctgtccctgggctgatga

SEQ ID NO: 704 - DNA, 1341 bp, synthetic construct
  misc_feature 1..1341: note = TB006 heavy chain DNA sequence
  source 1..1341: mol_type = other DNA
cagattcaattggttcagagcggctcagaactgaaaaagcctggagccagcgttaaagtgagctgtaaagccagtggatacacattcaccacttacgtcatgtcctgggttagacaggcccctggacaggggctggaatggatgggctggataaacactcactctggagtgcccacatacgccgacgactttacaggcaggttcgtgttttccctagatactagtgtgaatactgcatacttgcaaatctcttctctgaaagcagaggataccgccgtgtacttttgcacccgcgatgggaatgatggggatgccatggacaactggggccaggggacgactgtgacagtgtcttcagctagcaccaagggccccagcgtgtttcctctcgctccctgcagccggagcacatccgagagcaccgctgctctgggctgtctcgtgaaggactacttccctgaacccgtcaccgtcagctggaatagcggcgccctgacatccggcgtccacacattccccgctgtcctgcagagcagcggcctgtacagcctgagctccgtggtcaccgtgcctagcagcagcctgggaacaaagacctacacctgcaacgtggaccataagccctccaacaccaaggtggacaagcgggtggaatccaagtatggacccccctgtcctccttgccctgctcctgaatttctcggaggcccctccgtcttcctgtttccccccaagcccaaggacaccctgatgatctcccggacacccgaagtcacctgcgtcgtggtggatgtcagccaggaagatcccgaggtgcagttcaactggtacgtggacggagtggaggtgcataacgccaaaaccaagcccagggaagagcagttcaacagcacctatcgggtcgtgtccgtgctcaccgtcctgcatcaggattggctcaacggcaaggagtacaagtgcaaggtgtccaacaagggcctgccctcctccatcgagaagaccatctccaaggctaagggccaacctcgggagccccaagtgtataccctccctcccagccaggaggagatgaccaagaatcaagtgagcctgacctgcctcgtgaagggattttacccctccgacatcgctgtggaatgggaaagcaatggccaacctgagaacaactacaagaccacaccccccgtgctggactccgatggctccttcttcctgtacagcaggctgaccgtggacaaatcccggtggcaagagggaaacgtgttcagctgctccgtgatgcacgaggctctccacaaccactacacccagaagagcctctccctgagcctcggctagtaa

SEQ ID NO: 705 - DNA, 1350 bp, synthetic construct
  misc_feature 1..1350: note = 12G5.D7 heavy chain DNA sequence
  source 1..1350: mol_type = other DNA
caggtgcagctgaagcagtctggggctgagctggtgaggcctggggcttcagtgaagctgtcctgcaaggcttctggctacactttcactgactactatataaactgggtgaagcagaggcctggacagggacttgagtggattgcaaggatttatcctggaactggtaatactgactacaatgagaagttcaagggcagggccacactgactgcagaaaactcctccagcactgcctacatgcagctcagcagtctgacatctgaggactctgctgtctatttctgtgcaagatttgcgtattactacggtagtggagggtactttgactactggggccacggcaccactctcacagtctcctcagctagcaccaagggccccagcgtgtttcctctcgctccctgcagccggagcacatccgagagcaccgctgctctgggctgtctcgtgaaggactacttccctgaacccgtcaccgtcagctggaatagcggcgccctgacatccggcgtccacacattccccgctgtcctgcagagcagcggcctgtacagcctgagctccgtggtcaccgtgcctagcagcagcctgggaacaaagacctacacctgcaacgtggaccataagccctccaacaccaaggtggacaagcgggtggaatccaagtatggacccccctgtcctccttgccctgctcctgaatttctcggaggcccctccgtcttcctgtttccccccaagcccaaggacaccctgatgatctcccggacacccgaagtcacctgcgtcgtggtggatgtcagccaggaagatcccgaggtgcagttcaactggtacgtggacggagtggaggtgcataacgccaaaaccaagcccagggaagagcagttcaacagcacctatcgggtcgtgtccgtgctcaccgtcctgcatcaggattggctcaacggcaaggagtacaagtgcaaggtgtccaacaagggcctgccctcctccatcgagaagaccatctccaaggctaagggccaacctcgggagccccaagtgtataccctccctcccagccaggaggagatgaccaagaatcaagtgagcctgacctgcctcgtgaagggattttacccctccgacatcgctgtggaatgggaaagcaatggccaacctgagaacaactacaagaccacaccccccgtgctggactccgatggctccttcttcctgtacagcaggctgaccgtggacaaatcccggtggcaagagggaaacgtgttcagctgctccgtgatgcacgaggctctccacaaccactacacccagaagagcctctccctgagcctcggctagtaa

SEQ ID NO: 706 - DNA, 1341 bp, synthetic construct
  misc_feature 1..1341: note = 13A12.2E5 heavy chain DNA sequence
  source 1..1341: mol_type = other DNA
cagatccagttggtacagtctggacctgagctgaagaagcctggagagacagtcaagatctcctgcaagacttctgggtataaattcaaaacctatgtgatgagctgggtgaaacaggctccaggaaaggctttaaagtggatgggctggataaacacctactctggagtgccaacatatgctgatgacttcaagggacgatttgccttctctttggaaacctctgccagcactgcctatttggagatcatcaacctcaaaaatgaggacacggctacatatttctgtgcaagagatggtaactacggggatcctatggactactggggtcaaggaacctcagtcaccgtctcctcagctagcaccaagggccccagcgtgtttcctctcgctccctgcagccggagcacatccgagagcaccgctgctctgggctgtctcgtgaaggactacttccctgaacccgtcaccgtcagctggaatagcggcgccctgacatccggcgtccacacattccccgctgtcctgcagagcagcggcctgtacagcctgagctccgtggtcaccgtgcctagcagcagcctgggaacaaagacctacacctgcaacgtggaccataagccctccaacaccaaggtggacaagcgggtggaatccaagtatggacccccctgtcctccttgccctgctcctgaatttctcggaggcccctccgtcttcctgtttccccccaagcccaaggacaccctgatgatctcccggacacccgaagtcacctgcgtcgtggtggatgtcagccaggaagatcccgaggtgcagttcaactggtacgtggacggagtggaggtgcataacgccaaaaccaagcccagggaagagcagttcaacagcacctatcgggtcgtgtccgtgctcaccgtcctgcatcaggattggctcaacggcaaggagtacaagtgcaaggtgtccaacaagggcctgccctcctccatcgagaagaccatctccaaggctaagggccaacctcgggagccccaagtgtataccctccctcccagccaggaggagatgaccaagaatcaagtgagcctgacctgcctcgtgaagggattttacccctccgacatcgctgtggaatgggaaagcaatggccaacctgagaacaactacaagaccacaccccccgtgctggactccgatggctccttcttcctgtacagcaggctgaccgtggacaaatcccggtggcaagagggaaacgtgttcagctgctccgtgatgcacgaggctctccacaaccactacacccagaagagcctctccctgagcctcggctagtaa

SEQ ID NO: 707 - DNA, 1335 bp, synthetic construct
  misc_feature 1..1335: note = 14H10.2C9 heavy chain DNA sequence
  source 1..1335: mol_type = other DNA
cagatccagttggtacagtctggacctgagctgaagaagcctggagagacagtcaagatctcctgcaaggcttctgggtataccttcacaacctatggaatgggctgggtgaaacaggctccaggaaaggatttaaagtggatgggctggataaacacctactctggagtgccaacatatgctgatgacttcaagggacggtttgccttctctttggaaacctctgccagcactgcctatttgcagatcagcaacctcaaaaatgaagacacggctacatatttctgttcaaccccttatgaatacgacggggcttactggggccaggggactctggtcactgtctctgcagctagcaccaagggccccagcgtgtttcctctcgctccctgcagccggagcacatccgagagcaccgctgctctgggctgtctcgtgaaggactacttccctgaacccgtcaccgtcagctggaatagcggcgccctgacatccggcgtccacacattccccgctgtcctgcagagcagcggcctgtacagcctgagctccgtggtcaccgtgcctagcagcagcctgggaacaaagacctacacctgcaacgtggaccataagccctccaacaccaaggtggacaagcgggtggaatccaagtatggacccccctgtcctccttgccctgctcctgaatttctcggaggcccctccgtcttcctgtttccccccaagcccaaggacaccctgatgatctcccggacacccgaagtcacctgcgtcgtggtggatgtcagccaggaagatcccgaggtgcagttcaactggtacgtggacggagtggaggtgcataacgccaaaaccaagcccagggaagagcagttcaacagcacctatcgggtcgtgtccgtgctcaccgtcctgcatcaggattggctcaacggcaaggagtacaagtgcaaggtgtccaacaagggcctgccctcctccatcgagaagaccatctccaaggctaagggccaacctcgggagccccaagtgtataccctccctcccagccaggaggagatgaccaagaatcaagtgagcctgacctgcctcgtgaagggattttacccctccgacatcgctgtggaatgggaaagcaatggccaacctgagaacaactacaagaccacaccccccgtgctggactccgatggctccttcttcctgtacagcaggctgaccgtggacaaatcccggtggcaagagggaaacgtgttcagctgctccgtgatgcacgaggctctccacaaccactacacccagaagagcctctccctgagcctcggctagtaa

SEQ ID NO: 708 - DNA, 1323 bp, synthetic construct
  misc_feature 1..1323: note = 15F10.2D6 heavy chain DNA sequence
  source 1..1323: mol_type = other DNA
gaagtacagctggtggagtctgggggaggcttagtgaagcctggagggtccctgaaactctcctgtgcagcctctggattcgctttcagttcctatgccatgtcttgggttcgccagactccggaaaagaggctggagtgggtcgcaaccattagtgatggtggtgtttacacctactatacagaccatgtaaagggccgattcaccatctccagagacaatgccgaggacaacctgtacctgcaaatgagccatctgaagtctgaggacacagccatgtattattgtgtgagagatgggggctactggggccaaggcaccactctcacagtctcctcagctagcaccaagggccccagcgtgtttcctctcgctccctgcagccggagcacatccgagagcaccgctgctctgggctgtctcgtgaaggactacttccctgaacccgtcaccgtcagctggaatagcggcgccctgacatccggcgtccacacattccccgctgtcctgcagagcagcggcctgtacagcctgagctccgtggtcaccgtgcctagcagcagcctgggaacaaagacctacacctgcaacgtggaccataagccctccaacaccaaggtggacaagcgggtggaatccaagtatggacccccctgtcctccttgccctgctcctgaatttctcggaggcccctccgtcttcctgtttccccccaagcccaaggacaccctgatgatctcccggacacccgaagtcacctgcgtcgtggtggatgtcagccaggaagatcccgaggtgcagttcaactggtacgtggacggagtggaggtgcataacgccaaaaccaagcccagggaagagcagttcaacagcacctatcgggtcgtgtccgtgctcaccgtcctgcatcaggattggctcaacggcaaggagtacaagtgcaaggtgtccaacaagggcctgccctcctccatcgagaagaccatctccaaggctaagggccaacctcgggagccccaagtgtataccctccctcccagccaggaggagatgaccaagaatcaagtgagcctgacctgcctcgtgaagggattttacccctccgacatcgctgtggaatgggaaagcaatggccaacctgagaacaactacaagaccacaccccccgtgctggactccgatggctccttcttcctgtacagcaggctgaccgtggacaaatcccggtggcaagagggaaacgtgttcagctgctccgtgatgcacgaggctctccacaaccactacacccagaagagcctctccctgagcctcggctagtaa

SEQ ID NO: 709 - DNA, 1332 bp, synthetic construct
  misc_feature 1..1332: note = 19B5.2E6 heavy chain DNA sequence
  source 1..1332: mol_type = other DNA
cagatccaacttgttcagagcgggcctgaattgaagaaaccaggcgagactgtaaagatctcctgtaaggccagtggctatacattcaccacctacgcaatgagctgggtcaagcaggcacccggaaagggtctgaagtggatgggttggataaatacatactcaggcgtcccaacctacgctgatgatttgaaggggcgctttgccttttctcttgaaacctcagcatcaaccgcctacttgcagataaataacctcaaaaatgaagacaccgctacctatttctgcgcaagggggccttatgctatggactactggggccagggcacctctgtgactgtaagttctgctagcaccaagggccccagcgtgtttcctctcgctccctgcagccggagcacatccgagagcaccgctgctctgggctgtctcgtgaaggactacttccctgaacccgtcaccgtcagctggaatagcggcgccctgacatccggcgtccacacattccccgctgtcctgcagagcagcggcctgtacagcctgagctccgtggtcaccgtgcctagcagcagcctgggaacaaagacctacacctgcaacgtggaccataagccctccaacaccaaggtggacaagcgggtggaatccaagtatggacccccctgtcctccttgccctgctcctgaatttctcggaggcccctccgtcttcctgtttccccccaagcccaaggacaccctgatgatctcccggacacccgaagtcacctgcgtcgtggtggatgtcagccaggaagatcccgaggtgcagttcaactggtacgtggacggagtggaggtgcataacgccaaaaccaagcccagggaagagcagttcaacagcacctatcgggtcgtgtccgtgctcaccgtcctgcatcaggattggctcaacggcaaggagtacaagtgcaaggtgtccaacaagggcctgccctcctccatcgagaagaccatctccaaggctaagggccaacctcgggagccccaagtgtataccctccctcccagccaggaggagatgaccaagaatcaagtgagcctgacctgcctcgtgaagggattttacccctccgacatcgctgtggaatgggaaagcaatggccaacctgagaacaactacaagaccacaccccccgtgctggactccgatggctccttcttcctgtacagcaggctgaccgtggacaaatcccggtggcaagagggaaacgtgttcagctgctccgtgatgcacgaggctctccacaaccactacacccagaagagcctctccctgagcctcggctagtaa

SEQ ID NO: 710 - DNA, 1329 bp, synthetic construct
  misc_feature 1..1329: note = 20D11.2C6 heavy chain DNA sequence
  source 1..1329: mol_type = other DNA
gaggtccagctgcaacaatctggacctgaactggtgaagcctggggcttcagtgaagatatcctgtaaggcttctggatacacgttcactgacttctacataaactgggtgaagcagagccatggaaagagccttgagtggattggagatattaatcctaagaatggtggtattaactacaacccgaagttcaagatcaaggccacattgactgtagacaagtcctccagcacatcctacatggacctccgcggcctgacatctgaggactctgcagtctattactgcacctcaggctacggatttccttactggggccaagggactctggtcactgtctctgcagctagcaccaagggccccagcgtgtttcctctcgctccctgcagccggagcacatccgagagcaccgctgctctgggctgtctcgtgaaggactacttccctgaacccgtcaccgtcagctggaatagcggcgccctgacatccggcgtccacacattccccgctgtcctgcagagcagcggcctgtacagcctgagctccgtggtcaccgtgcctagcagcagcctgggaacaaagacctacacctgcaacgtggaccataagccctccaacaccaaggtggacaagcgggtggaatccaagtatggacccccctgtcctccttgccctgctcctgaatttctcggaggcccctccgtcttcctgtttccccccaagcccaaggacaccctgatgatctcccggacacccgaagtcacctgcgtcgtggtggatgtcagccaggaagatcccgaggtgcagttcaactggtacgtggacggagtggaggtgcataacgccaaaaccaagcccagggaagagcagttcaacagcacctatcgggtcgtgtccgtgctcaccgtcctgcatcaggattggctcaacggcaaggagtacaagtgcaaggtgtccaacaagggcctgccctcctccatcgagaagaccatctccaaggctaagggccaacctcgggagccccaagtgtataccctccctcccagccaggaggagatgaccaagaatcaagtgagcctgacctgcctcgtgaagggattttacccctccgacatcgctgtggaatgggaaagcaatggccaacctgagaacaactacaagaccacaccccccgtgctggactccgatggctccttcttcctgtacagcaggctgaccgtggacaaatcccggtggcaagagggaaacgtgttcagctgctccgtgatgcacgaggctctccacaaccactacacccagaagagcctctccctgagcctcggctagtaa

SEQ ID NO: 711 - DNA, 1332 bp, synthetic construct
  misc_feature 1..1332: note = 20H5.A3 heavy chain DNA sequence
  source 1..1332: mol_type = other DNA
cagatccagttggtacagtctggacctgagctgaagaagcctggagagtcagtcaagatctcctgcaaggcttctggttatgccttcacaacctatggaatgagctgggtgcaacaggctccaggaaagggtttaaagtggatgggctgggtaaacacctactctggagtgccaacatgtgctgatgacttcaagggacggtttgccttctctttggaaacctctgccagcactgcctatttgcagatcaacaacctcagaaatgaggacacggctacatatttctgtgcaagagggccctatgctatggactactggggtcaaggaacctcagtcaccgtctcctcagctagcaccaagggccccagcgtgtttcctctcgctccctgcagccggagcacatccgagagcaccgctgctctgggctgtctcgtgaaggactacttccctgaacccgtcaccgtcagctggaatagcggcgccctgacatccggcgtccacacattccccgctgtcctgcagagcagcggcctgtacagcctgagctccgtggtcaccgtgcctagcagcagcctgggaacaaagacctacacctgcaacgtggaccataagccctccaacaccaaggtggacaagcgggtggaatccaagtatggacccccctgtcctccttgccctgctcctgaatttctcggaggcccctccgtcttcctgtttccccccaagcccaaggacaccctgatgatctcccggacacccgaagtcacctgcgtcgtggtggatgtcagccaggaagatcccgaggtgcagttcaactggtacgtggacggagtggaggtgcataacgccaaaaccaagcccagggaagagcagttcaacagcacctatcgggtcgtgtccgtgctcaccgtcctgcatcaggattggctcaacggcaaggagtacaagtgcaaggtgtccaacaagggcctgccctcctccatcgagaagaccatctccaaggctaagggccaacctcgggagccccaagtgtataccctccctcccagccaggaggagatgaccaagaatcaagtgagcctgacctgcctcgtgaagggattttacccctccgacatcgctgtggaatgggaaagcaatggccaacctgagaacaactacaagaccacaccccccgtgctggactccgatggctccttcttcctgtacagcaggctgaccgtggacaaatcccggtggcaagagggaaacgtgttcagctgctccgtgatgcacgaggctctccacaaccactacacccagaagagcctctccctgagcctcggctagtaa

SEQ ID NO: 712 - DNA, 1332 bp, synthetic construct
  misc_feature 1..1332: note = 23H9.2E4 heavy chain DNA sequence
  source 1..1332: mol_type = other DNA
cagatccagttggtacagtctggacctgagctgaagaagcctggagagacagtcaagatctcctgcaaggcttctgggtataccttcacaacctatgcaatgagctgggtgaaacaggctccaggaaagggtttaaagtggatgggctggataaacacctactctggagtgccaacatatgctgatgacctcaagggacggtttgccttctctttggaaacctctgccagcactgcctatttgcagatcaacaacctcaaaaatgaggacacggctacatatttctgtgcaagagggccctatgctatggactactggggtcaaggaacctcagtcaccgtctcctcagctagcaccaagggccccagcgtgtttcctctcgctccctgcagccggagcacatccgagagcaccgctgctctgggctgtctcgtgaaggactacttccctgaacccgtcaccgtcagctggaatagcggcgccctgacatccggcgtccacacattccccgctgtcctgcagagcagcggcctgtacagcctgagctccgtggtcaccgtgcctagcagcagcctgggaacaaagacctacacctgcaacgtggaccataagccctccaacaccaaggtggacaagcgggtggaatccaagtatggacccccctgtcctccttgccctgctcctgaatttctcggaggcccctccgtcttcctgtttccccccaagcccaaggacaccctgatgatctcccggacacccgaagtcacctgcgtcgtggtggatgtcagccaggaagatcccgaggtgcagttcaactggtacgtggacggagtggaggtgcataacgccaaaaccaagcccagggaagagcagttcaacagcacctatcgggtcgtgtccgtgctcaccgtcctgcatcaggattggctcaacggcaaggagtacaagtgcaaggtgtccaacaagggcctgccctcctccatcgagaagaccatctccaaggctaagggccaacctcgggagccccaagtgtataccctccctcccagccaggaggagatgaccaagaatcaagtgagcctgacctgcctcgtgaagggattttacccctccgacatcgctgtggaatgggaaagcaatggccaacctgagaacaactacaagaccacaccccccgtgctggactccgatggctccttcttcctgtacagcaggctgaccgtggacaaatcccggtggcaagagggaaacgtgttcagctgctccgtgatgcacgaggctctccacaaccactacacccagaagagcctctccctgagcctcggctagtaa

SEQ ID NO: 713 - DNA, 1344 bp, synthetic construct
  misc_feature 1..1344: note = 2D10-VH0-VL0 heavy chain DNA sequence
  source 1..1344: mol_type = other DNA
caagtacagctccagcaatcaggacctgaacttgttaagccaggtgcaagcgtcaaaataagttgtaaagcatcaggttacacctttacagactactatatcaactgggtcaagcaacggcctggtcagggacttgaatggataggttggatctaccctgggtcacaagacaccaagtacaatgaaaaatttaaggggaaagccactctgacagtagatactagctcaagtaccgcctacatgcagctcggcagcctcacttccgaggactctgccgtatatttctgtgccaactacttcgggtcttctgggtggttctttgatgtgtggggaaccggcaccaccgtaaccgtttcctcagctagcaccaagggccccagcgtgtttcctctcgctccctgcagccggagcacatccgagagcaccgctgctctgggctgtctcgtgaaggactacttccctgaacccgtcaccgtcagctggaatagcggcgccctgacatccggcgtccacacattccccgctgtcctgcagagcagcggcctgtacagcctgagctccgtggtcaccgtgcctagcagcagcctgggaacaaagacctacacctgcaacgtggaccataagccctccaacaccaaggtggacaagcgggtggaatccaagtatggacccccctgtcctccttgccctgctcctgaatttctcggaggcccctccgtcttcctgtttccccccaagcccaaggacaccctgatgatctcccggacacccgaagtcacctgcgtcgtggtggatgtcagccaggaagatcccgaggtgcagttcaactggtacgtggacggagtggaggtgcataacgccaaaaccaagcccagggaagagcagttcaacagcacctatcgggtcgtgtccgtgctcaccgtcctgcatcaggattggctcaacggcaaggagtacaagtgcaaggtgtccaacaagggcctgccctcctccatcgagaagaccatctccaaggctaagggccaacctcgggagccccaagtgtataccctccctcccagccaggaggagatgaccaagaatcaagtgagcctgacctgcctcgtgaagggattttacccctccgacatcgctgtggaatgggaaagcaatggccaacctgagaacaactacaagaccacaccccccgtgctggactccgatggctccttcttcctgtacagcaggctgaccgtggacaaatcccggtggcaagagggaaacgtgttcagctgctccgtgatgcacgaggctctccacaaccactacacccagaagagcctctccctgagcctcggctagtaa

SEQ ID NO: 714 - DNA, 1341 bp, synthetic construct
  misc_feature 1..1341: note = 3B11.2G2 heavy chain DNA sequence
  source 1..1341: mol_type = other DNA
cagatccagttggtacagtctggacctgagctgaagaagcctggagagacagtcaagatctcctgcaagacttctgggtataaattcaaaacctatgtaatgagctgggtgaaacaggctccaggaaaggctttaaagtggatgggctggataaacacctactctggagtgccaacatatgctgatgacttcaagggacggtttgccttctctttggaaacctctgccagcactgcctatttggagatcatcaacctcaaaaatgaggacacggctacatatttctgtgcaagagatggtaattacggggatcctatggactactggggtcaaggaacctcagtcaccgtctcctcagctagcaccaagggccccagcgtgtttcctctcgctccctgcagccggagcacatccgagagcaccgctgctctgggctgtctcgtgaaggactacttccctgaacccgtcaccgtcagctggaatagcggcgccctgacatccggcgtccacacattccccgctgtcctgcagagcagcggcctgtacagcctgagctccgtggtcaccgtgcctagcagcagcctgggaacaaagacctacacctgcaacgtggaccataagccctccaacaccaaggtggacaagcgggtggaatccaagtatggacccccctgtcctccttgccctgctcctgaatttctcggaggcccctccgtcttcctgtttccccccaagcccaaggacaccctgatgatctcccggacacccgaagtcacctgcgtcgtggtggatgtcagccaggaagatcccgaggtgcagttcaactggtacgtggacggagtggaggtgcataacgccaaaaccaagcccagggaagagcagttcaacagcacctatcgggtcgtgtccgtgctcaccgtcctgcatcaggattggctcaacggcaaggagtacaagtgcaaggtgtccaacaagggcctgccctcctccatcgagaagaccatctccaaggctaagggccaacctcgggagccccaagtgtataccctccctcccagccaggaggagatgaccaagaatcaagtgagcctgacctgcctcgtgaagggattttacccctccgacatcgctgtggaatgggaaagcaatggccaacctgagaacaactacaagaccacaccccccgtgctggactccgatggctccttcttcctgtacagcaggctgaccgtggacaaatcccggtggcaagagggaaacgtgttcagctgctccgtgatgcacgaggctctccacaaccactacacccagaagagcctctccctgagcctcggctagtaa

SEQ ID NO: 715 - DNA, 1323 bp, synthetic construct
  misc_feature 1..1323: note = 7D8.2D8 heavy chain DNA sequence
  source 1..1323: mol_type = other DNA
gaagtgcagctggtggagtctgggggaggcttagtgaagcctggagggtccctgaaactctcctgtgcagcctctggattcactttcagtagctatgccatgtcttgggttcgccagactccggaaaagaggctggagtgggtcgcaaccatcagtgatggtggtatttacacctactatccagacaatgtaaagggccgattcaccatttccagagacaatgccaagaacaacctgttcctgcaaatgagccatctgaagtctgaggatacagccatgtattactgtgtaagagatgggggctactggggccaaggcaccactctcacagtctcctcagctagcaccaagggccccagcgtgtttcctctcgctccctgcagccggagcacatccgagagcaccgctgctctgggctgtctcgtgaaggactacttccctgaacccgtcaccgtcagctggaatagcggcgccctgacatccggcgtccacacattccccgctgtcctgcagagcagcggcctgtacagcctgagctccgtggtcaccgtgcctagcagcagcctgggaacaaagacctacacctgcaacgtggaccataagccctccaacaccaaggtggacaagcgggtggaatccaagtatggacccccctgtcctccttgccctgctcctgaatttctcggaggcccctccgtcttcctgtttccccccaagcccaaggacaccctgatgatctcccggacacccgaagtcacctgcgtcgtggtggatgtcagccaggaagatcccgaggtgcagttcaactggtacgtggacggagtggaggtgcataacgccaaaaccaagcccagggaagagcagttcaacagcacctatcgggtcgtgtccgtgctcaccgtcctgcatcaggattggctcaacggcaaggagtacaagtgcaaggtgtccaacaagggcctgccctcctccatcgagaagaccatctccaaggctaagggccaacctcgggagccccaagtgtataccctccctcccagccaggaggagatgaccaagaatcaagtgagcctgacctgcctcgtgaagggattttacccctccgacatcgctgtggaatgggaaagcaatggccaacctgagaacaactacaagaccacaccccccgtgctggactccgatggctccttcttcctgtacagcaggctgaccgtggacaaatcccggtggcaagagggaaacgtgttcagctgctccgtgatgcacgaggctctccacaaccactacacccagaagagcctctccctgagcctcggctagtaa

SEQ ID NO: 716 - DNA, 1344 bp, synthetic construct
  misc_feature 1..1344: note = mIMT001 heavy chain DNA sequence
  source 1..1344: mol_type = other DNA
cagatccaacttgtgcagtcaggtccagaattgaagaagcctggtgagaccgtcaagatttcctgtaaggcctctggttatacttttaccaactatggcatgaattgggtcaagcaggcacctgggaagggtttgaaatggatggggtggataaataccaacacaggggaaccaacttacgttgaagagtttaagggtcgttttgcattcagtcttgagacttctgcaagcacagcttacctccaaattaacaatctcaaaaatgaagatactgctacatatttctgtgctccttatgataattttttcgcctactggggacagggaactctggtcaccgtctcagcagctaagactactcctcccagtgtctaccccctggcccccgtgtgcggcgacacaacaggctcctccgtgacactgggctgcctggtgaaaggctacttccccgagcccgtgacactgacatggaactccggctccctgtcctccggcgtgcacacattccccgccgtgctgcagtccgacctgtacacactgtcctcctccgtgacagtgacatcctccacatggccctcccagtccatcacatgcaacgtggcccaccccgcctcctccacaaaagtggacaaaaaaatcgagcccaggggccccacaatcaaaccctgccccccctgcaaatgccccgcccccaacgccgccggcggcccctccgtgttcatcttcccccccaaaatcaaagacgtgctgatgatctccctgtcccccatcgtgacatgcgtggtggtggacgtgtccgaggacgaccccgacgtgcagatctcctggttcgtgaacaacgtggaggtgcacacagcccagacacagacacacagggaggactacaactccacactgagggtggtgtccgccctgcccatccagcaccaggactggatgtccggcaaagagttcaaatgcaaagtgaacaacaaagacctgggcgcccccatcgagaggacaatctccaaacccaaaggctccgtgagggccccccaggtgtacgtgctgcccccccccgaggaggagatgacaaaaaaacaggtgacactgacatgcatggtgacagacttcatgcccgaggacatctacgtggagtggacaaacaacggcaaaacagagctgaactacaaaaacacagagcccgtgctggactccgacggctcctacttcatgtactccaaactgagggtggagaaaaaaaactgggtggagaggaactcctactcctgctccgtggtgcacgagggcctgcacaaccaccacacaacaaaatccttctccaggacacccggcaaatagtaa

SEQ ID NO: 717 - DNA, 1332 bp, synthetic construct
  misc_feature 1..1332: note = 4A11.2B5 heavy chain DNA sequence
  source 1..1332: mol_type = other DNA
caggtacaacttcagcagagcggtccagaacttgtgaagcccggtgctagtgtcaaaatatcttgcaaagcaagtggttattccttcaccaactattacatacactgggtaaaacaacgtccagggcaaggactcgaatggattggttggatctaccccggcagcggcaacactaactacaacgagaagtttaaaggcaaagctactctcacagcagacacttctagcagtacaacaaatatgcagttgtcctctctgacttccgaagacagcgccgtctattactgttctactgcacccggaggttttgacgtctggggttccggcaccacagttaccgttagttccgctagcaccaagggccccagcgtgtttcctctcgctccctgcagccggagcacatccgagagcaccgctgctctgggctgtctcgtgaaggactacttccctgaacccgtcaccgtcagctggaatagcggcgccctgacatccggcgtccacacattccccgctgtcctgcagagcagcggcctgtacagcctgagctccgtggtcaccgtgcctagcagcagcctgggaacaaagacctacacctgcaacgtggaccataagccctccaacaccaaggtggacaagcgggtggaatccaagtatggacccccctgtcctccttgccctgctcctgaatttctcggaggcccctccgtcttcctgtttccccccaagcccaaggacaccctgatgatctcccggacacccgaagtcacctgcgtcgtggtggatgtcagccaggaagatcccgaggtgcagttcaactggtacgtggacggagtggaggtgcataacgccaaaaccaagcccagggaagagcagttcaacagcacctatcgggtcgtgtccgtgctcaccgtcctgcatcaggattggctcaacggcaaggagtacaagtgcaaggtgtccaacaagggcctgccctcctccatcgagaagaccatctccaaggctaagggccaacctcgggagccccaagtgtataccctccctcccagccaggaggagatgaccaagaatcaagtgagcctgacctgcctcgtgaagggattttacccctccgacatcgctgtggaatgggaaagcaatggccaacctgagaacaactacaagaccacaccccccgtgctggactccgatggctccttcttcctgtacagcaggctgaccgtggacaaatcccggtggcaagagggaaacgtgttcagctgctccgtgatgcacgaggctctccacaaccactacacccagaagagcctctccctgagcctcggctagtaa

SEQ ID NO: 718 - DNA, 1332 bp, synthetic construct
  misc_feature 1..1332: note = 4A11.H1L1 heavy chain DNA sequence
  source 1..1332: mol_type = other DNA
caggtgcagctggtgcaatcaggagccgaagttaagaagcctggcgccagcgtcaaggtctcatgtaaagcctccggttacagtttcaccaactactatatgcactgggttaggcaagcaccaggccaggggcttgagtggatgggatggatctatccagggagcggtaacaccaattacaatgagaagtttcaagggcgcgtaaccatgacagcagataccagtataagcaccgcctatatggaactctctcggttgagatccgatgataccgctgtttattactgctctaccgcacctggtggtttcgacgtttggggccaaggtactacagtgaccgtatcatcagctagcaccaagggccccagcgtgtttcctctcgctccctgcagccggagcacatccgagagcaccgctgctctgggctgtctcgtgaaggactacttccctgaacccgtcaccgtcagctggaatagcggcgccctgacatccggcgtccacacattccccgctgtcctgcagagcagcggcctgtacagcctgagctccgtggtcaccgtgcctagcagcagcctgggaacaaagacctacacctgcaacgtggaccataagccctccaacaccaaggtggacaagcgggtggaatccaagtatggacccccctgtcctccttgccctgctcctgaatttctcggaggcccctccgtcttcctgtttccccccaagcccaaggacaccctgatgatctcccggacacccgaagtcacctgcgtcgtggtggatgtcagccaggaagatcccgaggtgcagttcaactggtacgtggacggagtggaggtgcataacgccaaaaccaagcccagggaagagcagttcaacagcacctatcgggtcgtgtccgtgctcaccgtcctgcatcaggattggctcaacggcaaggagtacaagtgcaaggtgtccaacaagggcctgccctcctccatcgagaagaccatctccaaggctaagggccaacctcgggagccccaagtgtataccctccctcccagccaggaggagatgaccaagaatcaagtgagcctgacctgcctcgtgaagggattttacccctccgacatcgctgtggaatgggaaagcaatggccaacctgagaacaactacaagaccacaccccccgtgctggactccgatggctccttcttcctgtacagcaggctgaccgtggacaaatcccggtggcaagagggaaacgtgttcagctgctccgtgatgcacgaggctctccacaaccactacacccagaagagcctctccctgagcctcggctagtaa

SEQ ID NO: 719 - DNA, 1332 bp, synthetic construct
  misc_feature 1..1332: note = 4A11.H4L2 heavy chain DNA sequence
  source 1..1332: mol_type = other DNA
caggtgcaactggtccagtctggggccgaggtcaaaaagcctggagcctccgtcaaagtgtcatgtaaagcctcagggtatagtttcaccaactactatatacattgggtcagacaagccccaggccagcgtcttgagtggatgggatggatttatcccggatcagggaatacaaactataacgagaaatttcaaggcagagttactctcactgccgatacctctgcaagtactacctatatggagctctccagtctcagaagcgaagacacagcagtatattactgtagcaccgccccaggcgggtttgacgtgtggggccaaggcactactgtaaccgttagctcagctagcaccaagggccccagcgtgtttcctctcgctccctgcagccggagcacatccgagagcaccgctgctctgggctgtctcgtgaaggactacttccctgaacccgtcaccgtcagctggaatagcggcgccctgacatccggcgtccacacattccccgctgtcctgcagagcagcggcctgtacagcctgagctccgtggtcaccgtgcctagcagcagcctgggaacaaagacctacacctgcaacgtggaccataagccctccaacaccaaggtggacaagcgggtggaatccaagtatggacccccctgtcctccttgccctgctcctgaatttctcggaggcccctccgtcttcctgtttccccccaagcccaaggacaccctgatgatctcccggacacccgaagtcacctgcgtcgtggtggatgtcagccaggaagatcccgaggtgcagttcaactggtacgtggacggagtggaggtgcataacgccaaaaccaagcccagggaagagcagttcaacagcacctatcgggtcgtgtccgtgctcaccgtcctgcatcaggattggctcaacggcaaggagtacaagtgcaaggtgtccaacaagggcctgccctcctccatcgagaagaccatctccaaggctaagggccaacctcgggagccccaagtgtataccctccctcccagccaggaggagatgaccaagaatcaagtgagcctgacctgcctcgtgaagggattttacccctccgacatcgctgtggaatgggaaagcaatggccaacctgagaacaactacaagaccacaccccccgtgctggactccgatggctccttcttcctgtacagcaggctgaccgtggacaaatcccggtggcaagagggaaacgtgttcagctgctccgtgatgcacgaggctctccacaaccactacacccagaagagcctctccctgagcctcggctagtaa

SEQ ID NO: 720 - DNA, 1341 bp, synthetic construct
  misc_feature 1..1341: note = 4G2.2G6 heavy chain DNA sequence
  source 1..1341: mol_type = other DNA
caaatacagctcgtgcagtctggtcccgatttgaagaagcctggagaaaccgtaaagataagctgtaaggctagtggttacactttcacaacatacgttatgtcatgggttaaacaggctcctggaaaagaccttaaatggatgggatggattaacacccatagcggtgtcccaacttacgctgacgattttaagggacgatttgacttttctctcgaaacttctgccaacacagcttttttgcagatcaacaatctcaagaatgaagacaccgcaacctatttctgcactcgagatgggaacgacggggatgcaatggataactggggacaaggcacatcagttaccgtgagctctgctagcaccaagggccccagcgtgtttcctctcgctccctgcagccggagcacatccgagagcaccgctgctctgggctgtctcgtgaaggactacttccctgaacccgtcaccgtcagctggaatagcggcgccctgacatccggcgtccacacattccccgctgtcctgcagagcagcggcctgtacagcctgagctccgtggtcaccgtgcctagcagcagcctgggaacaaagacctacacctgcaacgtggaccataagccctccaacaccaaggtggacaagcgggtggaatccaagtatggacccccctgtcctccttgccctgctcctgaatttctcggaggcccctccgtcttcctgtttccccccaagcccaaggacaccctgatgatctcccggacacccgaagtcacctgcgtcgtggtggatgtcagccaggaagatcccgaggtgcagttcaactggtacgtggacggagtggaggtgcataacgccaaaaccaagcccagggaagagcagttcaacagcacctatcgggtcgtgtccgtgctcaccgtcctgcatcaggattggctcaacggcaaggagtacaagtgcaaggtgtccaacaagggcctgccctcctccatcgagaagaccatctccaaggctaagggccaacctcgggagccccaagtgtataccctccctcccagccaggaggagatgaccaagaatcaagtgagcctgacctgcctcgtgaagggattttacccctccgacatcgctgtggaatgggaaagcaatggccaacctgagaacaactacaagaccacaccccccgtgctggactccgatggctccttcttcctgtacagcaggctgaccgtggacaaatcccggtggcaagagggaaacgtgttcagctgctccgtgatgcacgaggctctccacaaccactacacccagaagagcctctccctgagcctcggctagtaa

SEQ ID NO: 721 - DNA, 1344 bp, synthetic construct
  misc_feature 1..1344: note = 6B3.2D3 heavy chain DNA sequence
  source 1..1344: mol_type = other DNA
caggtgcagctgaagcagtcaggacctggcctagtgcagccctcacagagcctgtccatcacctgcacagtctctggtttctcattaactagttatggtgtacactgggttcgccagcctccaggaaagggtctggagtggctgggagtgatatggagtggtggaagcacagactataatgctgctttcatatccagactgagcatcagtaaggacaactccaagagccaagttttctttaaaatgaacagtctgcaagctgatgacactgccatatactactgtgccaaagggccttatgattacgacttaggctggtttgcttactggggccaagggactctggtcactgtctctgcagctagcaccaagggccccagcgtgtttcctctcgctccctgcagccggagcacatccgagagcaccgctgctctgggctgtctcgtgaaggactacttccctgaacccgtcaccgtcagctggaatagcggcgccctgacatccggcgtccacacattccccgctgtcctgcagagcagcggcctgtacagcctgagctccgtggtcaccgtgcctagcagcagcctgggaacaaagacctacacctgcaacgtggaccataagccctccaacaccaaggtggacaagcgggtggaatccaagtatggacccccctgtcctccttgccctgctcctgaatttctcggaggcccctccgtcttcctgtttccccccaagcccaaggacaccctgatgatctcccggacacccgaagtcacctgcgtcgtggtggatgtcagccaggaagatcccgaggtgcagttcaactggtacgtggacggagtggaggtgcataacgccaaaaccaagcccagggaagagcagttcaacagcacctatcgggtcgtgtccgtgctcaccgtcctgcatcaggattggctcaacggcaaggagtacaagtgcaaggtgtccaacaagggcctgccctcctccatcgagaagaccatctccaaggctaagggccaacctcgggagccccaagtgtataccctccctcccagccaggaggagatgaccaagaatcaagtgagcctgacctgcctcgtgaagggattttacccctccgacatcgctgtggaatgggaaagcaatggccaacctgagaacaactacaagaccacaccccccgtgctggactccgatggctccttcttcctgtacagcaggctgaccgtggacaaatcccggtggcaagagggaaacgtgttcagctgctccgtgatgcacgaggctctccacaaccactacacccagaagagcctctccctgagcctcggctagtaa

SEQ ID NO: 722 - DNA, 1332 bp, synthetic construct
  misc_feature 1..1332: note = 6H6.2D6 heavy chain DNA sequence
  source 1..1332: mol_type = other DNA
cagatccagctggtgcagtccggccccgagctgaagaagcccggcgagactgtgaagatctcctgcaaggcctccggctacaccttcaccacctacggcatgtcctgggtgaagcaggcccccggcaagggcctgaagtggatggcctggatcaacacctactccggcgtgcccacctacgccgacgacttcaagggcaggttcgccttctccctggagacttccgcctccaccgcctacctgcagatcaacaacctgaccaacgaggacaccgccacctacttctgcgccaggggcccctacgccatggactactggggccagggcacctccgtgaccgtgtcctccgctagcaccaagggccccagcgtgtttcctctcgctccctgcagccggagcacatccgagagcaccgctgctctgggctgtctcgtgaaggactacttccctgaacccgtcaccgtcagctggaatagcggcgccctgacatccggcgtccacacattccccgctgtcctgcagagcagcggcctgtacagcctgagctccgtggtcaccgtgcctagcagcagcctgggaacaaagacctacacctgcaacgtggaccataagccctccaacaccaaggtggacaagcgggtggaatccaagtatggacccccctgtcctccttgccctgctcctgaatttctcggaggcccctccgtcttcctgtttccccccaagcccaaggacaccctgatgatctcccggacacccgaagtcacctgcgtcgtggtggatgtcagccaggaagatcccgaggtgcagttcaactggtacgtggacggagtggaggtgcataacgccaaaaccaagcccagggaagagcagttcaacagcacctatcgggtcgtgtccgtgctcaccgtcctgcatcaggattggctcaacggcaaggagtacaagtgcaaggtgtccaacaagggcctgccctcctccatcgagaagaccatctccaaggctaagggccaacctcgggagccccaagtgtataccctccctcccagccaggaggagatgaccaagaatcaagtgagcctgacctgcctcgtgaagggattttacccctccgacatcgctgtggaatgggaaagcaatggccaacctgagaacaactacaagaccacaccccccgtgctggactccgatggctccttcttcctgtacagcaggctgaccgtggacaaatcccggtggcaagagggaaacgtgttcagctgctccgtgatgcacgaggctctccacaaccactacacccagaagagcctctccctgagcctcggctagtaa

SEQ ID NO: 723 - DNA, 1329 bp, synthetic construct
  misc_feature 1..1329: note = 9H2.2H10 heavy chain DNA sequence
  source 1..1329: mol_type = other DNA
caggtccagctgcagcagcctggggctgaactggtggggcctgggtcttcagtgaagctgtcctgcaaggcttctggctacaccttcaccaactactggatacattgggtgaagcagaggcctctacaaggccttgaatggattggtaacattgacccttctgatagtgaaactcactacaatcaaaagttcaaggacaaggccacattgactgtagacaaatcctccagcacagcctacatgcaactcagcagcctgacatctgaggactctgcggtctattactgtgcaagacatggttactacgactactggggccaaggcaccactctcacagtctcctcagctagcaccaagggccccagcgtgtttcctctcgctccctgcagccggagcacatccgagagcaccgctgctctgggctgtctcgtgaaggactacttccctgaacccgtcaccgtcagctggaatagcggcgccctgacatccggcgtccacacattccccgctgtcctgcagagcagcggcctgtacagcctgagctccgtggtcaccgtgcctagcagcagcctgggaacaaagacctacacctgcaacgtggaccataagccctccaacaccaaggtggacaagcgggtggaatccaagtatggacccccctgtcctccttgccctgctcctgaatttctcggaggcccctccgtcttcctgtttccccccaagcccaaggacaccctgatgatctcccggacacccgaagtcacctgcgtcgtggtggatgtcagccaggaagatcccgaggtgcagttcaactggtacgtggacggagtggaggtgcataacgccaaaaccaagcccagggaagagcagttcaacagcacctatcgggtcgtgtccgtgctcaccgtcctgcatcaggattggctcaacggcaaggagtacaagtgcaaggtgtccaacaagggcctgccctcctccatcgagaagaccatctccaaggctaagggccaacctcgggagccccaagtgtataccctccctcccagccaggaggagatgaccaagaatcaagtgagcctgacctgcctcgtgaagggattttacccctccgacatcgctgtggaatgggaaagcaatggccaacctgagaacaactacaagaccacaccccccgtgctggactccgatggctccttcttcctgtacagcaggctgaccgtggacaaatcccggtggcaagagggaaacgtgttcagctgctccgtgatgcacgaggctctccacaaccactacacccagaagagcctctccctgagcctcggctagtaa

SEQ ID NO: 724 - DNA, 1341 bp, synthetic construct
  misc_feature 1..1341: note = 13G4.2F8 heavy chain DNA sequence
  source 1..1341: mol_type = other DNA
caggtccagctgcagcagcctggggctgagctggtaaagcctggggcttcagtgaagttgtcctgcaaggcttctggctacactttcaccagctactggatgcactgggtgaagcagaggcctggacaaggccttgagtggattggaatgattcatcctaacagtggtagtactgactacaatgagaagttcaagaacaaggccacactgaatgtagacaaatcctccagtacagcctacatacaactcagcagcctgacatctgaggactctgcggtctattactgtacaagatgggggatttattactacgcgagggactactggggccaaggcaccactctcacagtctcctcagctagcaccaagggccccagcgtgtttcctctcgctccctgcagccggagcacatccgagagcaccgctgctctgggctgtctcgtgaaggactacttccctgaacccgtcaccgtcagctggaatagcggcgccctgacatccggcgtccacacattccccgctgtcctgcagagcagcggcctgtacagcctgagctccgtggtcaccgtgcctagcagcagcctgggaacaaagacctacacctgcaacgtggaccataagccctccaacaccaaggtggacaagcgggtggaatccaagtatggacccccctgtcctccttgccctgctcctgaatttctcggaggcccctccgtcttcctgtttccccccaagcccaaggacaccctgatgatctcccggacacccgaagtcacctgcgtcgtggtggatgtcagccaggaagatcccgaggtgcagttcaactggtacgtggacggagtggaggtgcataacgccaaaaccaagcccagggaagagcagttcaacagcacctatcgggtcgtgtccgtgctcaccgtcctgcatcaggattggctcaacggcaaggagtacaagtgcaaggtgtccaacaagggcctgccctcctccatcgagaagaccatctccaaggctaagggccaacctcgggagccccaagtgtataccctccctcccagccaggaggagatgaccaagaatcaagtgagcctgacctgcctcgtgaagggattttacccctccgacatcgctgtggaatgggaaagcaatggccaacctgagaacaactacaagaccacaccccccgtgctggactccgatggctccttcttcctgtacagcaggctgaccgtggacaaatcccggtggcaagagggaaacgtgttcagctgctccgtgatgcacgaggctctccacaaccactacacccagaagagcctctccctgagcctcggctagtaa

SEQ ID NO: 725 - DNA, 1335 bp, synthetic construct
  misc_feature 1..1335: note = 13H12.2F8 heavy chain DNA sequence
  source 1..1335: mol_type = other DNA
cagatccagctggtccaatcaggacccgaactgaaaaaaccaggcgagacagtcaaaatcagctgtaaggcctcaggctacactttcacaacctacgggatgtcatgggtaaagcaagctcctggcaaggggctgaaatggatgggttggatcaacacatactctggagtgcccacctacgctgacgactttaagggtagattcgcatttagcctggaaacaagtgccagtacagcctacctccagataaacaacttgaaaaacgaggataccgcaacctatttttgcgccgtcccctacgagtacgacggtgcctattggggtcagggtacactcgtaacagtttccgccgctagcaccaagggccccagcgtgtttcctctcgctccctgcagccggagcacatccgagagcaccgctgctctgggctgtctcgtgaaggactacttccctgaacccgtcaccgtcagctggaatagcggcgccctgacatccggcgtccacacattccccgctgtcctgcagagcagcggcctgtacagcctgagctccgtggtcaccgtgcctagcagcagcctgggaacaaagacctacacctgcaacgtggaccataagccctccaacaccaaggtggacaagcgggtggaatccaagtatggacccccctgtcctccttgccctgctcctgaatttctcggaggcccctccgtcttcctgtttccccccaagcccaaggacaccctgatgatctcccggacacccgaagtcacctgcgtcgtggtggatgtcagccaggaagatcccgaggtgcagttcaactggtacgtggacggagtggaggtgcataacgccaaaaccaagcccagggaagagcagttcaacagcacctatcgggtcgtgtccgtgctcaccgtcctgcatcaggattggctcaacggcaaggagtacaagtgcaaggtgtccaacaagggcctgccctcctccatcgagaagaccatctccaaggctaagggccaacctcgggagccccaagtgtataccctccctcccagccaggaggagatgaccaagaatcaagtgagcctgacctgcctcgtgaagggattttacccctccgacatcgctgtggaatgggaaagcaatggccaacctgagaacaactacaagaccacaccccccgtgctggactccgatggctccttcttcctgtacagcaggctgaccgtggacaaatcccggtggcaagagggaaacgtgttcagctgctccgtgatgcacgaggctctccacaaccactacacccagaagagcctctccctgagcctcggctagtaa

SEQ ID NO: 726 - DNA, 1329 bp, synthetic construct
  misc_feature 1..1329: note = 15G7.2A7 heavy chain DNA sequence
  source 1..1329: mol_type = other DNA
gaggtccagctgcaacaatctggacctgagctggtgaagcctggggcttcagtgaagatatcctgtaaggcttctggatacacgttcactgactactacatgaactgggtgaagcagagccatggaaagagccttgagtggattggagatattaatcctaacaatggtggtactaactacaaccagaagttcaagggcaaggccacattgactgtagacaagtcctccagcacagcctacatggagctccgcagcctgacatctgaggactctgcagtctattactgcacctcaggctacgggtttccttactggggccaggggactctggtcactgtctctgcagctagcaccaagggccccagcgtgtttcctctcgctccctgcagccggagcacatccgagagcaccgctgctctgggctgtctcgtgaaggactacttccctgaacccgtcaccgtcagctggaatagcggcgccctgacatccggcgtccacacattccccgctgtcctgcagagcagcggcctgtacagcctgagctccgtggtcaccgtgcctagcagcagcctgggaacaaagacctacacctgcaacgtggaccataagccctccaacaccaaggtggacaagcgggtggaatccaagtatggacccccctgtcctccttgccctgctcctgaatttctcggaggcccctccgtcttcctgtttccccccaagcccaaggacaccctgatgatctcccggacacccgaagtcacctgcgtcgtggtggatgtcagccaggaagatcccgaggtgcagttcaactggtacgtggacggagtggaggtgcataacgccaaaaccaagcccagggaagagcagttcaacagcacctatcgggtcgtgtccgtgctcaccgtcctgcatcaggattggctcaacggcaaggagtacaagtgcaaggtgtccaacaagggcctgccctcctccatcgagaagaccatctccaaggctaagggccaacctcgggagccccaagtgtataccctccctcccagccaggaggagatgaccaagaatcaagtgagcctgacctgcctcgtgaagggattttacccctccgacatcgctgtggaatgggaaagcaatggccaacctgagaacaactacaagaccacaccccccgtgctggactccgatggctccttcttcctgtacagcaggctgaccgtggacaaatcccggtggcaagagggaaacgtgttcagctgctccgtgatgcacgaggctctccacaaccactacacccagaagagcctctccctgagcctcggctagtaa

SEQ ID NO: 727 - DNA, 1335 bp, synthetic construct
  misc_feature 1..1335: note = 19D9.2E5 heavy chain DNA sequence
  source 1..1335: mol_type = other DNA
cagatccagttggtacagtctggacctgagctgaagaagcctggagagacagtcaagatctcctgcaaggcttctggatataccttcacaacctatggaatgggctgggtgaaacaggctccaggaaagggtttgaagtggatgggctggataaacacctactctggcgtgccaacatatgctgatgacttcaagggacggtttgccttctctttggaaacctctaccagcactgcctatttgcagatcaacaacctcaaaaatgaggacatggctacatatttctgtgcaaccccttatgaatacgacggggcttactggggccaagggactctggtcactgtctctgcagctagcaccaagggccccagcgtgtttcctctcgctccctgcagccggagcacatccgagagcaccgctgctctgggctgtctcgtgaaggactacttccctgaacccgtcaccgtcagctggaatagcggcgccctgacatccggcgtccacacattccccgctgtcctgcagagcagcggcctgtacagcctgagctccgtggtcaccgtgcctagcagcagcctgggaacaaagacctacacctgcaacgtggaccataagccctccaacaccaaggtggacaagcgggtggaatccaagtatggacccccctgtcctccttgccctgctcctgaatttctcggaggcccctccgtcttcctgtttccccccaagcccaaggacaccctgatgatctcccggacacccgaagtcacctgcgtcgtggtggatgtcagccaggaagatcccgaggtgcagttcaactggtacgtggacggagtggaggtgcataacgccaaaaccaagcccagggaagagcagttcaacagcacctatcgggtcgtgtccgtgctcaccgtcctgcatcaggattggctcaacggcaaggagtacaagtgcaaggtgtccaacaagggcctgccctcctccatcgagaagaccatctccaaggctaagggccaacctcgggagccccaagtgtataccctccctcccagccaggaggagatgaccaagaatcaagtgagcctgacctgcctcgtgaagggattttacccctccgacatcgctgtggaatgggaaagcaatggccaacctgagaacaactacaagaccacaccccccgtgctggactccgatggctccttcttcctgtacagcaggctgaccgtggacaaatcccggtggcaagagggaaacgtgttcagctgctccgtgatgcacgaggctctccacaaccactacacccagaagagcctctccctgagcctcggctagtaa

SEQ ID NO: 728 - DNA, 1320 bp, synthetic construct
  misc_feature 1..1320: note = 23B10.2B12 heavy chain DNA sequence
  source 1..1320: mol_type = other DNA
caggtccagctgcagcagtctggacctgaactggtgaagcctggggattctgtgaagatatcctgcaaggctgctggctacaccttcagtgactattatataaactgggtgaagcagaggcctggacagggacttgagtggattggatggatttatcctgtaagcgttaatactaagtacaatgagaagttcaagggcaaggccacattgactgtagacacatcctccagcacagcctacatgcagctcagcagcctgacctctgaggactctggggtctatttctgtgcctaccttgattattggggccaagggactctggtcactgtctctgcagctagcaccaagggccccagcgtgtttcctctcgctccctgcagccggagcacatccgagagcaccgctgctctgggctgtctcgtgaaggactacttccctgaacccgtcaccgtcagctggaatagcggcgccctgacatccggcgtccacacattccccgctgtcctgcagagcagcggcctgtacagcctgagctccgtggtcaccgtgcctagcagcagcctgggaacaaagacctacacctgcaacgtggaccataagccctccaacaccaaggtggacaagcgggtggaatccaagtatggacccccctgtcctccttgccctgctcctgaatttctcggaggcccctccgtcttcctgtttccccccaagcccaaggacaccctgatgatctcccggacacccgaagtcacctgcgtcgtggtggatgtcagccaggaagatcccgaggtgcagttcaactggtacgtggacggagtggaggtgcataacgccaaaaccaagcccagggaagagcagttcaacagcacctatcgggtcgtgtccgtgctcaccgtcctgcatcaggattggctcaacggcaaggagtacaagtgcaaggtgtccaacaagggcctgccctcctccatcgagaagaccatctccaaggctaagggccaacctcgggagccccaagtgtataccctccctcccagccaggaggagatgaccaagaatcaagtgagcctgacctgcctcgtgaagggattttacccctccgacatcgctgtggaatgggaaagcaatggccaacctgagaacaactacaagaccacaccccccgtgctggactccgatggctccttcttcctgtacagcaggctgaccgtggacaaatcccggtggcaagagggaaacgtgttcagctgctccgtgatgcacgaggctctccacaaccactacacccagaagagcctctccctgagcctcggctagtaa

SEQ ID NO: 729 - DNA, 1344 bp, synthetic construct
  misc_feature 1..1344: note = 24D12.2H9 heavy chain DNA sequence
  source 1..1344: mol_type = other DNA
caggtgcagctgaagcagtcaggacctggcctagtgcagccctcacagagcctgtccatcacctgcacagtctctggtttctcattaactagctatggtgtacactgggttcgccaggctccaggaaagggtctggaatggctgggagtgatatggagtggtggaagcacagactataatgctgctttcatgtccagactgagcatcagcaaggacaactccaagagccaagttttctttaaaatgaacagtctgcaagctgatgacactgccatatactactgtgccaaaagccctgatggttacgacgtcgcctggtttggttactggggccaagggactctggtcactgtctctgcagctagcaccaagggccccagcgtgtttcctctcgctccctgcagccggagcacatccgagagcaccgctgctctgggctgtctcgtgaaggactacttccctgaacccgtcaccgtcagctggaatagcggcgccctgacatccggcgtccacacattccccgctgtcctgcagagcagcggcctgtacagcctgagctccgtggtcaccgtgcctagcagcagcctgggaacaaagacctacacctgcaacgtggaccataagccctccaacaccaaggtggacaagcgggtggaatccaagtatggacccccctgtcctccttgccctgctcctgaatttctcggaggcccctccgtcttcctgtttccccccaagcccaaggacaccctgatgatctcccggacacccgaagtcacctgcgtcgtggtggatgtcagccaggaagatcccgaggtgcagttcaactggtacgtggacggagtggaggtgcataacgccaaaaccaagcccagggaagagcagttcaacagcacctatcgggtcgtgtccgtgctcaccgtcctgcatcaggattggctcaacggcaaggagtacaagtgcaaggtgtccaacaagggcctgccctcctccatcgagaagaccatctccaaggctaagggccaacctcgggagccccaagtgtataccctccctcccagccaggaggagatgaccaagaatcaagtgagcctgacctgcctcgtgaagggattttacccctccgacatcgctgtggaatgggaaagcaatggccaacctgagaacaactacaagaccacaccccccgtgctggactccgatggctccttcttcctgtacagcaggctgaccgtggacaaatcccggtggcaagagggaaacgtgttcagctgctccgtgatgcacgaggctctccacaaccactacacccagaagagcctctccctgagcctcggctagtaa

SEQ ID NO: 730 - DNA, 1350 bp, synthetic construct
  misc_feature 1..1350: note = F846C.1B2 heavy chain DNA sequence
  source 1..1350: mol_type = other DNA
cagatccagttggtgcagtctggacctgagctgaagaagcctggagagacagtcaagatctcctgcaaggcttctgggtataccttcacaaactatggaatgaattgggtgaagcaggctccaggaaagggtttaaagtggatgggctggataaacacctacactggagagccatcatatgctgatgacttcaagggacggtttgccttctctttggaaacctctgccagcactgcctatttgcagatcaacaacctcaaaaatgaggacatggctacatatttctgtgcaagatgggggggttacgctggggattactatgctatggacttctggggtcaaggaacctcagtcaccgtctcctcagctagcaccaagggccccagcgtgtttcctctcgctccctgcagccggagcacatccgagagcaccgctgctctgggctgtctcgtgaaggactacttccctgaacccgtcaccgtcagctggaatagcggcgccctgacatccggcgtccacacattccccgctgtcctgcagagcagcggcctgtacagcctgagctccgtggtcaccgtgcctagcagcagcctgggaacaaagacctacacctgcaacgtggaccataagccctccaacaccaaggtggacaagcgggtggaatccaagtatggacccccctgtcctccttgccctgctcctgaatttctcggaggcccctccgtcttcctgtttccccccaagcccaaggacaccctgatgatctcccggacacccgaagtcacctgcgtcgtggtggatgtcagccaggaagatcccgaggtgcagttcaactggtacgtggacggagtggaggtgcataacgccaaaaccaagcccagggaagagcagttcaacagcacctatcgggtcgtgtccgtgctcaccgtcctgcatcaggattggctcaacggcaaggagtacaagtgcaaggtgtccaacaagggcctgccctcctccatcgagaagaccatctccaaggctaagggccaacctcgggagccccaagtgtataccctccctcccagccaggaggagatgaccaagaatcaagtgagcctgacctgcctcgtgaagggattttacccctccgacatcgctgtggaatgggaaagcaatggccaacctgagaacaactacaagaccacaccccccgtgctggactccgatggctccttcttcctgtacagcaggctgaccgtggacaaatcccggtggcaagagggaaacgtgttcagctgctccgtgatgcacgaggctctccacaaccactacacccagaagagcctctccctgagcctcggctagtaa

SEQ ID NO: 731 - DNA, 1350 bp, synthetic construct
  misc_feature 1..1350: note = F846C.1F5 heavy chain DNA sequence
  source 1..1350: mol_type = other DNA
cagatccagttggtgcagtctggacctgagctgaagaagcctggagagacagtcaagatctcctgcaaggcttctgggtataccttcacaaactatggaatgaactgggtgaagcaggctccaggaaagggtttaaagtggatgggctggataaacacctacactggagagccatcatatgctgatgacttcaagggacggtttgccttctctttggaaacctctgccagcactgcctatttgcagatcaacaacctcaaaaatgaggacatggctacatatttctgtgcaagatgggggggttacgatggggattactatgctatggactactggggtcaaggaacctcagtcaccgtctcctcagctagcaccaagggccccagcgtgtttcctctcgctccctgcagccggagcacatccgagagcaccgctgctctgggctgtctcgtgaaggactacttccctgaacccgtcaccgtcagctggaatagcggcgccctgacatccggcgtccacacattccccgctgtcctgcagagcagcggcctgtacagcctgagctccgtggtcaccgtgcctagcagcagcctgggaacaaagacctacacctgcaacgtggaccataagccctccaacaccaaggtggacaagcgggtggaatccaagtatggacccccctgtcctccttgccctgctcctgaatttctcggaggcccctccgtcttcctgtttccccccaagcccaaggacaccctgatgatctcccggacacccgaagtcacctgcgtcgtggtggatgtcagccaggaagatcccgaggtgcagttcaactggtacgtggacggagtggaggtgcataacgccaaaaccaagcccagggaagagcagttcaacagcacctatcgggtcgtgtccgtgctcaccgtcctgcatcaggattggctcaacggcaaggagtacaagtgcaaggtgtccaacaagggcctgccctcctccatcgagaagaccatctccaaggctaagggccaacctcgggagccccaagtgtataccctccctcccagccaggaggagatgaccaagaatcaagtgagcctgacctgcctcgtgaagggattttacccctccgacatcgctgtggaatgggaaagcaatggccaacctgagaacaactacaagaccacaccccccgtgctggactccgatggctccttcttcctgtacagcaggctgaccgtggacaaatcccggtggcaagagggaaacgtgttcagctgctccgtgatgcacgaggctctccacaaccactacacccagaagagcctctccctgagcctcggctagtaa

SEQ ID NO: 732 - DNA, 1350 bp, synthetic construct
  misc_feature 1..1350: note = F846C.1H12 heavy chain DNA sequence
  source 1..1350: mol_type = other DNA
cagatccagttggtgcagtctggacctgagctgaagaagcctggagagacagtcaagatctcctgcaaggcttctgggtataccttcacaaactttggaatgaactgggtgaagcaggctccaggaaagggtttaaagtggatgggctggataaacacctacactggagagccatcatatgctgatgacttcaagggacggtttgccttctctttggaaacctctgccagcactgcctatttgcagatcaacaacctcaaaaatgaggacattgctacatatttctgtgcaagatgggggggttacgctggggattactatgctatggactactggggtcaaggaacctcagtcaccgtctcctcagctagcaccaagggccccagcgtgtttcctctcgctccctgcagccggagcacatccgagagcaccgctgctctgggctgtctcgtgaaggactacttccctgaacccgtcaccgtcagctggaatagcggcgccctgacatccggcgtccacacattccccgctgtcctgcagagcagcggcctgtacagcctgagctccgtggtcaccgtgcctagcagcagcctgggaacaaagacctacacctgcaacgtggaccataagccctccaacaccaaggtggacaagcgggtggaatccaagtatggacccccctgtcctccttgccctgctcctgaatttctcggaggcccctccgtcttcctgtttccccccaagcccaaggacaccctgatgatctcccggacacccgaagtcacctgcgtcgtggtggatgtcagccaggaagatcccgaggtgcagttcaactggtacgtggacggagtggaggtgcataacgccaaaaccaagcccagggaagagcagttcaacagcacctatcgggtcgtgtccgtgctcaccgtcctgcatcaggattggctcaacggcaaggagtacaagtgcaaggtgtccaacaagggcctgccctcctccatcgagaagaccatctccaaggctaagggccaacctcgggagccccaagtgtataccctccctcccagccaggaggagatgaccaagaatcaagtgagcctgacctgcctcgtgaagggattttacccctccgacatcgctgtggaatgggaaagcaatggccaacctgagaacaactacaagaccacaccccccgtgctggactccgatggctccttcttcctgtacagcaggctgaccgtggacaaatcccggtggcaagagggaaacgtgttcagctgctccgtgatgcacgaggctctccacaaccactacacccagaagagcctctccctgagcctcggctagtaa

SEQ ID NO: 733 - DNA, 1332 bp, synthetic construct
  misc_feature 1..1332: note = F846C.1H5 heavy chain DNA sequence
  source 1..1332: mol_type = other DNA
gaggtccagctgttggagtctgggggaggcttagtgaagcctggagggtccctgaaactctcctgtgcagcctctggattcactttcagcagctatgccatgtcttgggttcgccagactccagagaagaggctggagtgggtcgcatccattagtagtggtggtgacacctactatccagacagtgtgaagggccgattcaccatctctagagataatgccaggaacatcctgtacctgcaaatgagcagtctgaggtctgaggacacggccatgtattactgtgcaagttatggtaactccctctttgactactggggccaaggcaccactctcacagtctcctcagctagcaccaagggccccagcgtgtttcctctcgctccctgcagccggagcacatccgagagcaccgctgctctgggctgtctcgtgaaggactacttccctgaacccgtcaccgtcagctggaatagcggcgccctgacatccggcgtccacacattccccgctgtcctgcagagcagcggcctgtacagcctgagctccgtggtcaccgtgcctagcagcagcctgggaacaaagacctacacctgcaacgtggaccataagccctccaacaccaaggtggacaagcgggtggaatccaagtatggacccccctgtcctccttgccctgctcctgaatttctcggaggcccctccgtcttcctgtttccccccaagcccaaggacaccctgatgatctcccggacacccgaagtcacctgcgtcgtggtggatgtcagccaggaagatcccgaggtgcagttcaactggtacgtggacggagtggaggtgcataacgccaaaaccaagcccagggaagagcagttcaacagcacctatcgggtcgtgtccgtgctcaccgtcctgcatcaggattggctcaacggcaaggagtacaagtgcaaggtgtccaacaagggcctgccctcctccatcgagaagaccatctccaaggctaagggccaacctcgggagccccaagtgtataccctccctcccagccaggaggagatgaccaagaatcaagtgagcctgacctgcctcgtgaagggattttacccctccgacatcgctgtggaatgggaaagcaatggccaacctgagaacaactacaagaccacaccccccgtgctggactccgatggctccttcttcctgtacagcaggctgaccgtggacaaatcccggtggcaagagggaaacgtgttcagctgctccgtgatgcacgaggctctccacaaccactacacccagaagagcctctccctgagcctcggctagtaa

SEQ ID NO: 734 - DNA, 1350 bp, synthetic construct; identical to SEQ ID NO: 731
  misc_feature 1..1350: note = F846C.2H3 heavy chain DNA sequence
  source 1..1350: mol_type = other DNA

SEQ ID NO: 735 - DNA, 1326 bp, synthetic construct
  misc_feature 1..1326: note = F846TC.14A2 heavy chain DNA sequence
  source 1..1326: mol_type = other DNA
cagatccagttggtgcagtctggacctgagctgaagaagcctggagagacagtcaagatctcctgcaaggcttctgggtataccttcacaaactatggaatgaactgggtgaagcaggctccaggaaagggtttaaagtggatgggctggataaacacctacactggagagccaacatatgctggtgacctcaagggacggtttgccttctctttggaaacctctgccagcactgcctatttgcagatcaacaacctcaaaaatgaggacacggctacatatttctgtgtaagatatactatggactactggggtcaaggaacctcagtcaccgtctcctcagctagcaccaagggccccagcgtgtttcctctcgctccctgcagccggagcacatccgagagcaccgctgctctgggctgtctcgtgaaggactacttccctgaacccgtcaccgtcagctggaatagcggcgccctgacatccggcgtccacacattccccgctgtcctgcagagcagcggcctgtacagcctgagctccgtggtcaccgtgcctagcagcagcctgggaacaaagacctacacctgcaacgtggaccataagccctccaacaccaaggtggacaagcgggtggaatccaagtatggacccccctgtcctccttgccctgctcctgaatttctcggaggcccctccgtcttcctgtttccccccaagcccaaggacaccctgatgatctcccggacacccgaagtcacctgcgtcgtggtggatgtcagccaggaagatcccgaggtgcagttcaactggtacgtggacggagtggaggtgcataacgccaaaaccaagcccagggaagagcagttcaacagcacctatcgggtcgtgtccgtgctcaccgtcctgcatcaggattggctcaacggcaaggagtacaagtgcaaggtgtccaacaagggcctgccctcctccatcgagaagaccatctccaaggctaagggccaacctcgggagccccaagtgtataccctccctcccagccaggaggagatgaccaagaatcaagtgagcctgacctgcctcgtgaagggattttacccctccgacatcgctgtggaatgggaaagcaatggccaacctgagaacaactacaagaccacaccccccgtgctggactccgatggctccttcttcctgtacagcaggctgaccgtggacaaatcccggtggcaagagggaaacgtgttcagctgctccgtgatgcacgaggctctccacaaccactacacccagaagagcctctccctgagcctcggctagtaa

SEQ ID NO: 736 - DNA, 1356 bp, synthetic construct
  misc_feature 1..1356: note = F846TC.14E4 heavy chain DNA sequence
  source 1..1356: mol_type = other DNA
caggttactctgaaagagtctggccctgggatattgcagccctcccagaccctcagtctgacttgttctttctctgggttttcactgagcacttctggtatgggtgtaggctggattcgtcagccttcagggaagggtctggagtggctggcacacatttggtgggatgatgataagtactataacacagccctgaagagcgggctcacaatctccaaggatgcctccaaaaaccaggtcttcctcaagatcgccagtatggacactgcagatactgccacatactactgtgctcgaaacctctatgatggttcctacgggtactatgctatggactactggggtcaaggaacctcagtcaccgtctcctcagctagcaccaagggccccagcgtgtttcctctcgctccctgcagccggagcacatccgagagcaccgctgctctgggctgtctcgtgaaggactacttccctgaacccgtcaccgtcagctggaatagcggcgccctgacatccggcgtccacacattccccgctgtcctgcagagcagcggcctgtacagcctgagctccgtggtcaccgtgcctagcagcagcctgggaacaaagacctacacctgcaacgtggaccataagccctccaacaccaaggtggacaagcgggtggaatccaagtatggacccccctgtcctccttgccctgctcctgaatttctcggaggcccctccgtcttcctgtttccccccaagcccaaggacaccctgatgatctcccggacacccgaagtcacctgcgtcgtggtggatgtcagccaggaagatcccgaggtgcagttcaactggtacgtggacggagtggaggtgcataacgccaaaaccaagcccagggaagagcagttcaacagcacctatcgggtcgtgtccgtgctcaccgtcctgcatcaggattggctcaacggcaaggagtacaagtgcaaggtgtccaacaagggcctgccctcctccatcgagaagaccatctccaaggctaagggccaacctcgggagccccaagtgtataccctccctcccagccaggaggagatgaccaagaatcaagtgagcctgacctgcctcgtgaagggattttacccctccgacatcgctgtggaatgggaaagcaatggccaacctgagaacaactacaagaccacaccccccgtgctggactccgatggctccttcttcctgtacagcaggctgaccgtggacaaatcccggtggcaagagggaaacgtgttcagctgctccgtgatgcacgaggctctccacaaccactacacccagaagagcctctccctgagcctcggctagtaa

SEQ ID NO: 737 - DNA, 1350 bp, synthetic construct
  misc_feature 1..1350: note = F846TC.16B5 heavy chain DNA sequence
  source 1..1350: mol_type = other DNA
cagatccagttggtgcagtctggacctgagctgaagaagcctggagagacagtcaagatctcctgcaaggcttctgggtataccttcacaaactatggaatgaactgggtgaagcaggctccaggaaagggtttaaagtggatgggctggataaacacctacactggagagccagcatatgctgatgacttcaagggacggtttgccttctctttggaaacctctgccagcactgcctatttgcagatcaacaacctcaaaaatgaggacatggctacatatttctgtgcaagatgggggggttacgatggggattactatgctatggactactggggtcaaggaacctcagtcaccgtctcctcagctagcaccaagggccccagcgtgtttcctctcgctccctgcagccggagcacatccgagagcaccgctgctctgggctgtctcgtgaaggactacttccctgaacccgtcaccgtcagctggaatagcggcgccctgacatccggcgtccacacattccccgctgtcctgcagagcagcggcctgtacagcctgagctccgtggtcaccgtgcctagcagcagcctgggaacaaagacctacacctgcaacgtggaccataagccctccaacaccaaggtggacaagcgggtggaatccaagtatggacccccctgtcctccttgccctgctcctgaatttctcggaggcccctccgtcttcctgtttccccccaagcccaaggacaccctgatgatctcccggacacccgaagtcacctgcgtcgtggtggatgtcagccaggaagatcccgaggtgcagttcaactggtacgtggacggagtggaggtgcataacgccaaaaccaagcccagggaagagcagttcaacagcacctatcgggtcgtgtccgtgctcaccgtcctgcatcaggattggctcaacggcaaggagtacaagtgcaaggtgtccaacaagggcctgccctcctccatcgagaagaccatctccaaggctaagggccaacctcgggagccccaagtgtataccctccctcccagccaggaggagatgaccaagaatcaagtgagcctgacctgcctcgtgaagggattttacccctccgacatcgctgtggaatgggaaagcaatggccaacctgagaacaactacaagaccacaccccccgtgctggactccgatggctccttcttcctgtacagcaggctgaccgtggacaaatcccggtggcaagagggaaacgtgttcagctgctccgtgatgcacgaggctctccacaaccactacacccagaagagcctctccctgagcctcggctagtaa

SEQ ID NO: 738 - DNA, 1353 bp, synthetic construct
  misc_feature 1..1353: note = F846TC.7F10 heavy chain DNA sequence
  source 1..1353: mol_type = other DNA
gaagtgcagctggtggagtctgggggagacttagtgaagcctggagggtccctgaaactctcctgtgcagcctctggattcactttcagtaactatggcttgtcttggattcgccagactccagacaagaggctggagtgggtcgcaaccattagtagtggtggtagttacacctactatcctgacagtgtgaaggggcgattcaccatctccagagacagtgccaagaacaccctgtacctgcaaatgagcagtctgaagtctgaggacacagccatgtattactgtgcaagacatgcgcattactacggtgttagcccgtactactttgactactggggccaaggcacctgtctcacagtctcctcagctagcaccaagggccccagcgtgtttcctctcgctccctgcagccggagcacatccgagagcaccgctgctctgggctgtctcgtgaaggactacttccctgaacccgtcaccgtcagctggaatagcggcgccctgacatccggcgtccacacattccccgctgtcctgcagagcagcggcctgtacagcctgagctccgtggtcaccgtgcctagcagcagcctgggaacaaagacctacacctgcaacgtggaccataagccctccaacaccaaggtggacaagcgggtggaatccaagtatggacccccctgtcctccttgccctgctcctgaatttctcggaggcccctccgtcttcctgtttccccccaagcccaaggacaccctgatgatctcccggacacccgaagtcacctgcgtcgtggtggatgtcagccaggaagatcccgaggtgcagttcaactggtacgtggacggagtggaggtgcataacgccaaaaccaagcccagggaagagcagttcaacagcacctatcgggtcgtgtccgtgctcaccgtcctgcatcaggattggctcaacggcaaggagtacaagtgcaaggtgtccaacaagggcctgccctcctccatcgagaagaccatctccaaggctaagggccaacctcgggagccccaagtgtataccctccctcccagccaggaggagatgaccaagaatcaagtgagcctgacctgcctcgtgaagggattttacccctccgacatcgctgtggaatgggaaagcaatggccaacctgagaacaactacaagaccacaccccccgtgctggactccgatggctccttcttcctgtacagcaggctgaccgtggacaaatcccggtggcaagagggaaacgtgttcagctgctccgtgatgcacgaggctctccacaaccactacacccagaagagcctctccctgagcctcggctagtaa

SEQ ID NO: 739 - DNA, 1341 bp, synthetic construct
  misc_feature 1..1341: note = F847C.10B9 heavy chain DNA sequence
  source 1..1341: mol_type = other DNA
cagatccagttggtgcagtctggacctgaggtgaagaagcctggagagacagtcaagatctcctgcaaggcttctgggtatatcttcacaaactatggaatgaactgggtgaagcaggctccaggaaagggtttaaagtggatgggctggataaacacctacactggagagccaacatatactgatgacttcaagggacggtttgccttctctttggaaacctctgccagcactgcctatttgcagatcaacaacctcaaaaatgaggacacggctacatatttctgtgcaaagtttggtaactacgtgggagctatggactactggggtcaaggaacctcagtcaccgtctcctcagctagcaccaagggccccagcgtgtttcctctcgctccctgcagccggagcacatccgagagcaccgctgctctgggctgtctcgtgaaggactacttccctgaacccgtcaccgtcagctggaatagcggcgccctgacatccggcgtccacacattccccgctgtcctgcagagcagcggcctgtacagcctgagctccgtggtcaccgtgcctagcagcagcctgggaacaaagacctacacctgcaacgtggaccataagccctccaacaccaaggtggacaagcgggtggaatccaagtatggacccccctgtcctccttgccctgctcctgaatttctcggaggcccctccgtcttcctgtttccccccaagcccaaggacaccctgatgatctcccggacacccgaagtcacctgcgtcgtggtggatgtcagccaggaagatcccgaggtgcagttcaactggtacgtggacggagtggaggtgcataacgccaaaaccaagcccagggaagagcagttcaacagcacctatcgggtcgtgtccgtgctcaccgtcctgcatcaggattggctcaacggcaaggagtacaagtgcaaggtgtccaacaagggcctgccctcctccatcgagaagaccatctccaaggctaagggccaacctcgggagccccaagtgtataccctccctcccagccaggaggagatgaccaagaatcaagtgagcctgacctgcctcgtgaagggattttacccctccgacatcgctgtggaatgggaaagcaatggccaacctgagaacaactacaagaccacaccccccgtgctggactccgatggctccttcttcctgtacagcaggctgaccgtggacaaatcccggtggcaagagggaaacgtgttcagctgctccgtgatgcacgaggctctccacaaccactacacccagaagagcctctccctgagcctcggctagtaa

SEQ ID NO: 740 - DNA, 1344 bp, synthetic construct
  misc_feature 1..1344: note = F847C.11B1 heavy chain DNA sequence
  source 1..1344: mol_type = other DNA
gaggtccagcttcagcagtctggacctgagctggtgaaacctggggcctcagtgaagatatcctgcaaggcttctggaaacacattcactgaccacaacatgcactgggtgaagcagagccatggaaagagccttgagtggattggatatatttatccttacaatggtggtactggctacaaccagaagttcaagagcaaggccacattgactgtagacaattcctccagcacagtctacatggagctccgcagcctgacatctgaggactctgcagtctattactgtgcaagaggggagtatgattacctggcctggtttgcttactggggccaagggactctggtcactgtctctgcagctagcaccaagggccccagcgtgtttcctctcgctccctgcagccggagcacatccgagagcaccgctgctctgggctgtctcgtgaaggactacttccctgaacccgtcaccgtcagctggaatagcggcgccctgacatccggcgtccacacattccccgctgtcctgcagagcagcggcctgtacagcctgagctccgtggtcaccgtgcctagcagcagcctgggaacaaagacctacacctgcaacgtggaccataagccctccaacaccaaggtggacaagcgggtggaatccaagtatggacccccctgtcctccttgccctgctcctgaatttctcggaggcccctccgtcttcctgtttccccccaagcccaaggacaccctgatgatctcccggacacccgaagtcacctgcgtcgtggtggatgtcagccaggaagatcccgaggtgcagttcaactggtacgtggacggagtggaggtgcataacgccaaaaccaagcccagggaagagcagttcaacagcacctatcgggtcgtgtccgtgctcaccgtcctgcatcaggattggctcaacggcaaggagtacaagtgcaaggtgtccaacaagggcctgccctcctccatcgagaagaccatctccaaggctaagggccaacctcgggagccccaagtgtataccctccctcccagccaggaggagatgaccaagaatcaagtgagcctgacctgcctcgtgaagggattttacccctccgacatcgctgtggaatgggaaagcaatggccaacctgagaacaactacaagaccacaccccccgtgctggactccgatggctccttcttcctgtacagcaggctgaccgtggacaaatcccggtggcaagagggaaacgtgttcagctgctccgtgatgcacgaggctctccacaaccactacacccagaagagcctctccctgagcctcggctagtaa

SEQ ID NO: 741 - DNA, 1341 bp, synthetic construct
  misc_feature 1..1341: note = F847C.12F12 heavy chain DNA sequence
  source 1..1341: mol_type = other DNA
cagatccagttggtgcagtctggacctgagctgaagaagcctggagagacagtcaagatctcctgcaaggcttctgggtataccttcacaaactatggaatgaactgggtgaagcaggctccaggaaagggtttaaagtggatgggctggataaacacctacactggagagccaacatatgttgatgacttcaagggacggtttgccttctctttggaaacctctgccagcactgcctatttgcggatcaacaacctcaaaaatgaggacacggctacatatttctgtgcaaagtttggtaactacgtgggagctatggactactggggtcaaggaacctcagtcaccgtctcctcagctagcaccaagggccccagcgtgtttcctctcgctccctgcagccggagcacatccgagagcaccgctgctctgggctgtctcgtgaaggactacttccctgaacccgtcaccgtcagctggaatagcggcgccctgacatccggcgtccacacattccccgctgtcctgcagagcagcggcctgtacagcctgagctccgtggtcaccgtgcctagcagcagcctgggaacaaagacctacacctgcaacgtggaccataagccctccaacaccaaggtggacaagcgggtggaatccaagtatggacccccctgtcctccttgccctgctcctgaatttctcggaggcccctccgtcttcctgtttccccccaagcccaaggacaccctgatgatctcccggacacccgaagtcacctgcgtcgtggtggatgtcagccaggaagatcccgaggtgcagttcaactggtacgtggacggagtggaggtgcataacgccaaaaccaagcccagggaagagcagttcaacagcacctatcgggtcgtgtccgtgctcaccgtcctgcatcaggattggctcaacggcaaggagtacaagtgcaaggtgtccaacaagggcctgccctcctccatcgagaagaccatctccaaggctaagggccaacctcgggagccccaagtgtataccctccctcccagccaggaggagatgaccaagaatcaagtgagcctgacctgcctcgtgaagggattttacccctccgacatcgctgtggaatgggaaagcaatggccaacctgagaacaactacaagaccacaccccccgtgctggactccgatggctccttcttcctgtacagcaggctgaccgtggacaaatcccggtggcaagagggaaacgtgttcagctgctccgtgatgcacgaggctctccacaaccactacacccagaagagcctctccctgagcctcggctagtaa

SEQ ID NO: 742 - DNA, 1341 bp, synthetic construct; identical to SEQ ID NO: 739
  misc_feature 1..1341: note = F847C.26F5 heavy chain DNA sequence
  source 1..1341: mol_type = other DNA

SEQ ID NO: 743 - DNA, 1335 bp, synthetic construct
  misc_feature 1..1335: note = F847C.4B10 heavy chain DNA sequence
  source 1..1335: mol_type = other DNA
gaggtgcagcttgttgagactgggggaggcttagtgaagcctggagggtccctgaaactctcctgtgcagcctctggattcactttcagtagctatgccatgtcttgggttcgccagactccagagaagaggctggagtgggtcgcatccattagtagtggtggtagcacctactatccagacagtgtgaagggccgattcaccatctccagagataatgccaggaacatcctgtacctgcaaatgagcagtctgaggtctgaggacacggccatgtattactgtacaaggtttactacggtagtagagatggactactggggtcaaggaacctcagtcaccgtctcctcagctagcaccaagggccccagcgtgtttcctctcgctccctgcagccggagcacatccgagagcaccgctgctctgggctgtctcgtgaaggactacttccctgaacccgtcaccgtcagctggaatagcggcgccctgacatccggcgtccacacattccccgctgtcctgcagagcagcggcctgtacagcctgagctccgtggtcaccgtgcctagcagcagcctgggaacaaagacctacacctgcaacgtggaccataagccctccaacaccaaggtggacaagcgggtggaatccaagtatggacccccctgtcctccttgccctgctcctgaatttctcggaggcccctccgtcttcctgtttccccccaagcccaaggacaccctgatgatctcccggacacccgaagtcacctgcgtcgtggtggatgtcagccaggaagatcccgaggtgcagttcaactggtacgtggacggagtggaggtgcataacgccaaaaccaagcccagggaagagcagttcaacagcacctatcgggtcgtgtccgtgctcaccgtcctgcatcaggattggctcaacggcaaggagtacaagtgcaaggtgtccaacaagggcctgccctcctccatcgagaagaccatctccaaggctaagggccaacctcgggagccccaagtgtataccctccctcccagccaggaggagatgaccaagaatcaagtgagcctgacctgcctcgtgaagggattttacccctccgacatcgctgtggaatgggaaagcaatggccaacctgagaacaactacaagaccacaccccccgtgctggactccgatggctccttcttcctgtacagcaggctgaccgtggacaaatcccggtggcaagagggaaacgtgttcagctgctccgtgatgcacgaggctctccacaaccactacacccagaagagcctctccctgagcctcggctagtaa

SEQ ID NO: 744 - DNA, 1320 bp, synthetic construct
  misc_feature 1..1320: note = F849C.8D10 heavy chain DNA sequence
  source 1..1320: mol_type = other DNA
caggtccaactgcagcagactggtgctgagcttgtgaagcctggggcctcagtgaagctgtcctgcaaggcttctggctatactttcaccagctactggataaactgggtgaagcagaggcctggacaaggccttgagtggattggaaacatttatcctggtagtagtagtatttactacagtgagaagttcaagagtaaggccacactgactgtagacacatcctccagcacagcctacatgcagctcagcagcctgacatctgacgactctgcggtctattattgtgcaagatggggctactggggccaaggcaccactctcacagtctcctcagctagcaccaagggccccagcgtgtttcctctcgctccctgcagccggagcacatccgagagcaccgctgctctgggctgtctcgtgaaggactacttccctgaacccgtcaccgtcagctggaatagcggcgccctgacatccggcgtccacacattccccgctgtcctgcagagcagcggcctgtacagcctgagctccgtggtcaccgtgcctagcagcagcctgggaacaaagacctacacctgcaacgtggaccataagccctccaacaccaaggtggacaagcgggtggaatccaagtatggacccccctgtcctccttgccctgctcctgaatttctcggaggcccctccgtcttcctgtttccccccaagcccaaggacaccctgatgatctcccggacacccgaagtcacctgcgtcgtggtggatgtcagccaggaagatcccgaggtgcagttcaactggtacgtggacggagtggaggtgcataacgccaaaaccaagcccagggaagagcagttcaacagcacctatcgggtcgtgtccgtgctcaccgtcctgcatcaggattggctcaacggcaaggagtacaagtgcaaggtgtccaacaagggcctgccctcctccatcgagaagaccatctccaaggctaagggccaacctcgggagccccaagtgtataccctccctcccagccaggaggagatgaccaagaatcaagtgagcctgacctgcctcgtgaagggattttacccctccgacatcgctgtggaatgggaaagcaatggccaacctgagaacaactacaagaccacaccccccgtgctggactccgatggctccttcttcctgtacagcaggctgaccgtggacaaatcccggtggcaagagggaaacgtgttcagctgctccgtgatgcacgaggctctccacaaccactacacccagaagagcctctccctgagcctcggctagtaa

SEQ ID NO: 745 - DNA, 1347 bp, synthetic construct
  misc_feature 1..1347: note = F849C.8H3 heavy chain DNA sequence
  source 1..1347: mol_type = other DNA
caggttactctgaaagagtctggccctgggatattgcagccctcccagaccctcagtctgacttgttctttctctgggttttcactgagcacttttggtatgggtgtaggctggattcgtcagccttcagggaagggtctggagtggctggcacacatttggtgggatgatgataaacactataacccagccctgaagagccggctcacaatctccaaggatacctccaaaaaccaggtcttcctcaggatcgccaatgtggacactgcagataatgccacatattactgtgctcgaatcgactatggtgactacgtcgggtttgcttattggggccaagggactctggtcactgtctctgcagctagcaccaagggccccagcgtgtttcctctcgctccctgcagccggagcacatccgagagcaccgctgctctgggctgtctcgtgaaggactacttccctgaacccgtcaccgtcagctggaatagcggcgccctgacatccggcgtccacacattccccgctgtcctgcagagcagcggcctgtacagcctgagctccgtggtcaccgtgcctagcagcagcctgggaacaaagacctacacctgcaacgtggaccataagccctccaacaccaaggtggacaagcgggtggaatccaagtatggacccccctgtcctccttgccctgctcctgaatttctcggaggcccctccgtcttcctgtttccccccaagcccaaggacaccctgatgatctcccggacacccgaagtcacctgcgtcgtggtggatgtcagccaggaagatcccgaggtgcagttcaactggtacgtggacggagtggaggtgcataacgccaaaaccaagcccagggaagagcagttcaacagcacctatcgggtcgtgtccgtgctcaccgtcctgcatcaggattggctcaacggcaaggagtacaagtgcaaggtgtccaacaagggcctgccctcctccatcgagaagaccatctccaaggctaagggccaacctcgggagccccaagtgtataccctccctcccagccaggaggagatgaccaagaatcaagtgagcctgacctgcctcgtgaagggattttacccctccgacatcgctgtggaatgggaaagcaatggccaacctgagaacaactacaagaccacaccccccgtgctggactccgatggctccttcttcctgtacagcaggctgaccgtggacaaatcccggtggcaagagggaaacgtgttcagctgctccgtgatgcacgaggctctccacaaccactacacccagaagagcctctccctgagcctcggctagtaa

SEQ ID NO: 746 - DNA, 1338 bp, synthetic construct
  misc_feature 1..1338: note = 846.2B11 heavy chain DNA sequence
  source 1..1338: mol_type = other DNA
caggtccagctacagcagtctggacctgagctggtgaggcctggggctttagtgaagatttcctgcaaggcttctggttacaccttcacaagctacgatataaactgggtgaagcagaggcctggacagggacttgagtggattggatggatttatcctggagatggtagtactaaatataatgagaaattcaagggcaaggccacactgactgcagacaaatcctccagcacagcctacatgcagctcagcagcctgacttctgagaactctgcagtctatttctgtgcaagagaggcggcttctaatgctatggactactggggtcaaggaacctcagtcaccgtctcctcagctagcaccaagggccccagcgtgtttcctctcgctccctgcagccggagcacatccgagagcaccgctgctctgggctgtctcgtgaaggactacttccctgaacccgtcaccgtcagctggaatagcggcgccctgacatccggcgtccacacattccccgctgtcctgcagagcagcggcctgtacagcctgagctccgtggtcaccgtgcctagcagcagcctgggaacaaagacctacacctgcaacgtggaccataagccctccaacaccaaggtggacaagcgggtggaatccaagtatggacccccctgtcctccttgccctgctcctgaatttctcggaggcccctccgtcttcctgtttccccccaagcccaaggacaccctgatgatctcccggacacccgaagtcacctgcgtcgtggtggatgtcagccaggaagatcccgaggtgcagttcaactggtacgtggacggagtggaggtgcataacgccaaaaccaagcccagggaagagcagttcaacagcacctatcgggtcgtgtccgtgctcaccgtcctgcatcaggattggctcaacggcaaggagtacaagtgcaaggtgtccaacaagggcctgccctcctccatcgagaagaccatctccaaggctaagggccaacctcgggagccccaagtgtataccctccctcccagccaggaggagatgaccaagaatcaagtgagcctgacctgcctcgtgaagggattttacccctccgacatcgctgtggaatgggaaagcaatggccaacctgagaacaactacaagaccacaccccccgtgctggactccgatggctccttcttcctgtacagcaggctgaccgtggacaaatcccggtggcaagagggaaacgtgttcagctgctccgtgatgcacgaggctctccacaaccactacacccagaagagcctctccctgagcctcggctagtaa

SEQ ID NO: 747 - DNA, 1350 bp, synthetic construct
  misc_feature 1..1350: note = 846.4D5 heavy chain DNA sequence
  source 1..1350: mol_type = other DNA
gaagtgaagcttgaggagtctggaggaggcttggtgcaacctggaggatccatgaaactctcctgtgttgcctctggattcactttcagtaactactggatgaactgggtccgccagtctccagagaaggggcttgagtgggttgctgaaattagattgaaatctaataattatgcaacacattatgcggagtctgtgaaagggaggttcaccatctcaagagatgattccaaaagtagtgtctacctgcaaatgaacaacttaagagctgaagacactggcatttattactgtaccaggcactacggctttccctactggtacttcgatgtctggggcgcagggaccacggtcaccgtctcctcagctagcaccaagggccccagcgtgtttcctctcgctccctgcagccggagcacatccgagagcaccgctgctctgggctgtctcgtgaaggactacttccctgaacccgtcaccgtcagctggaatagcggcgccctgacatccggcgtccacacattccccgctgtcctgcagagcagcggcctgtacagcctgagctccgtggtcaccgtgcctagcagcagcctgggaacaaagacctacacctgcaacgtggaccataagccctccaacaccaaggtggacaagcgggtggaatccaagtatggacccccctgtcctccttgccctgctcctgaatttctcggaggcccctccgtcttcctgtttccccccaagcccaaggacaccctgatgatctcccggacacccgaagtcacctgcgtcgtggtggatgtcagccaggaagatcccgaggtgcagttcaactggtacgtggacggagtggaggtgcataacgccaaaaccaagcccagggaagagcagttcaacagcacctatcgggtcgtgtccgtgctcaccgtcctgcatcaggattggctcaacggcaaggagtacaagtgcaaggtgtccaacaagggcctgccctcctccatcgagaagaccatctccaaggctaagggccaacctcgggagccccaagtgtataccctccctcccagccaggaggagatgaccaagaatcaagtgagcctgacctgcctcgtgaagggattttacccctccgacatcgctgtggaatgggaaagcaatggccaacctgagaacaactacaagaccacaccccccgtgctggactccgatggctccttcttcctgtacagcaggctgaccgtggacaaatcccggtggcaagagggaaacgtgttcagctgctccgtgatgcacgaggctctccacaaccactacacccagaagagcctctccctgagcctcggctagtaa

SEQ ID NO: 748 - DNA, 1338 bp, synthetic construct
  misc_feature 1..1338: note = 846T.1H2 heavy chain DNA sequence
  source 1..1338: mol_type = other DNA
cagatccagttggtgcagtctggacctgagctgaagaagcctggagagacagtcaagatctcctgcaaggcttctgggtataccttcacaaactatggaatgaactgggtgaagcaggctccaggaaagggtttaaagtggatgggctggataaacaccaacactggagagccaacatatgctgaagagttcaagggacggtttgccttctctttggaaacctctgccagcactgcctatttgcagatcaacaacctcaaaaatgaggacacggctacatatttctgtgcaaccggggggggtaactgggactttgactactggggccaaggcaccactctcacagtctcctcagctagcaccaagggccccagcgtgtttcctctcgctccctgcagccggagcacatccgagagcaccgctgctctgggctgtctcgtgaaggactacttccctgaacccgtcaccgtcagctggaatagcggcgccctgacatccggcgtccacacattccccgctgtcctgcagagcagcggcctgtacagcctgagctccgtggtcaccgtgcctagcagcagcctgggaacaaagacctacacctgcaacgtggaccataagccctccaacaccaaggtggacaagcgggtggaatccaagtatggacccccctgtcctccttgccctgctcctgaatttctcggaggcccctccgtcttcctgtttccccccaagcccaaggacaccctgatgatctcccggacacccgaagtcacctgcgtcgtggtggatgtcagccaggaagatcccgaggtgcagttcaactggtacgtggacggagtggaggtgcataacgccaaaaccaagcccagggaagagcagttcaacagcacctatcgggtcgtgtccgtgctcaccgtcctgcatcaggattggctcaacggcaaggagtacaagtgcaaggtgtccaacaagggcctgccctcctccatcgagaagaccatctccaaggctaagggccaacctcgggagccccaagtgtataccctccctcccagccaggaggagatgaccaagaatcaagtgagcctgacctgcctcgtgaagggattttacccctccgacatcgctgtggaatgggaaagcaatggccaacctgagaacaactacaagaccacaccccccgtgctggactccgatggctccttcttcctgtacagcaggctgaccgtggacaaatcccggtggcaagagggaaacgtgttcagctgctccgtgatgcacgaggctctccacaaccactacacccagaagagcctctccctgagcctcggctagtaa

SEQ ID NO: 749 - DNA, 1326 bp, synthetic construct
  misc_feature 1..1326: note = 847.14H4 heavy chain DNA sequence
  source 1..1326: mol_type = other DNA
cagatccagttggtgcagtctggacctgaactgacgaagcctggagagacagtcaagatctcctgtaaggcttctggctataccttcacagactatggaatgaactgggtgaggcaggctccaggagagactttaaagtggatgggctggataaacacctacactggagagccaacatatgctgatgacttcaaggggcggtttgccttctctttggaatcctctgccagcactgcctatttgcagatcaacaacctcaaaaatgaggacgtggctacatatttctgtgcaagataccctatggactactggggtcaaggaacctcagtcaccgtctcctcagctagcaccaagggccccagcgtgtttcctctcgctccctgcagccggagcacatccgagagcaccgctgctctgggctgtctcgtgaaggactacttccctgaacccgtcaccgtcagctggaatagcggcgccctgacatccggcgtccacacattccccgctgtcctgcagagcagcggcctgtacagcctgagctccgtggtcaccgtgcctagcagcagcctgggaacaaagacctacacctgcaacgtggaccataagccctccaacaccaaggtggacaagcgggtggaatccaagtatggacccccctgtcctccttgccctgctcctgaatttctcggaggcccctccgtcttcctgtttccccccaagcccaaggacaccctgatgatctcccggacacccgaagtcacctgcgtcgtggtggatgtcagccaggaagatcccgaggtgcagttcaactggtacgtggacggagtggaggtgcataacgccaaaaccaagcccagggaagagcagttcaacagcacctatcgggtcgtgtccgtgctcaccgtcctgcatcaggattggctcaacggcaaggagtacaagtgcaaggtgtccaacaagggcctgccctcctccatcgagaagaccatctccaaggctaagggccaacctcgggagccccaagtgtataccctccctcccagccaggaggagatgaccaagaatcaagtgagcctgacctgcctcgtgaagggattttacccctccgacatcgctgtggaatgggaaagcaatggccaacctgagaacaactacaagaccacaccccccgtgctggactccgatggctccttcttcctgtacagcaggctgaccgtggacaaatcccggtggcaagagggaaacgtgttcagctgctccgtgatgcacgaggctctccacaaccactacacccagaagagcctctccctgagcctcggctagtaa

SEQ ID NO: 750 - DNA, 663 bp, synthetic construct
  misc_feature 1..663: note = TB001 light chain DNA sequence
  source 1..663: mol_type = other DNA
gacatcgtgctgacccagtctccactgagcctgcctgttacacctggcgagccagcctccatctcctgcagatcctctaagtccctgctgtacaaggacggcaagacctacctgaactggttcctgcagaagcccggccagtctcctcagctcctgatctacctgatgagcacccatgcctctggcgtgcccgatagattttccggctctggctctggcaccgacttcaccctgaagatctccagagtggaagccgaggacgtgggcgtgtactactgtcagcagctggtggactaccctctgacctttggcggcggaacaaagctggaaatcaagcggacagtggccgctccttccgtgttcatcttcccaccttccgacgagcagctgaagtccggcacagcttctgtcgtgtgcctgctgaacaacttctaccctcgggaagccaaggtgcagtggaaggtggacaatgccctgcagtccggcaactcccaagagtctgtgaccgagcaggactccaaggacagcacctacagcctgtcctccacactgaccctgtccaaggccgactacgagaagcacaaggtgtacgcctgcgaagtgacccatcagggcctgtctagccctgtgaccaagtctttcaaccggggcgagtgctgatga

SEQ ID NO: 751 - DNA, 660 bp, synthetic construct
  misc_feature 1..660: note = TB006 light chain DNA sequence
  source 1..660: mol_type = other DNA
gatatagtgatgacccaaacacctttgtccctgtcagtcaccccaggccaacccgcatctatctcatgcaaatcctcaaaaagtcttttgcactctgacgggataacatatctctactggtatcttcaaaaacctggtcagtccccccagctcttgatctatagaatgagtaaccttgcctctggtgtccccgaccggtttagtggaagcgggtctgggaccgacttcaccctcaagattagtcgcgtcgaagccgaagatgtgggagtgtattactgtgcccagatgctcgaatttcccctgacatttggtcaaggaactaaattggagattaagcggaccgtggccgcccccagcgtgttcatcttccctcccagcgacgagcagctgaagtctggcaccgccagcgtggtgtgcctgctgaacaacttctacccccgcgaggccaaggtgcagtggaaggtggacaacgccctgcagagcggcaacagccaggagagcgtgaccgagcaggactccaaggacagcacctacagcctgagcagcaccctgaccctgagcaaggccgactacgagaagcacaaggtgtacgcctgcgaggtgacccaccagggactgtctagccccgtgaccaagagcttcaaccggggcgagtgctaa

SEQ ID NO: 752 - DNA, 645 bp, synthetic construct
  misc_feature 1..645: note = 12G5.D7 light chain DNA sequence
  source 1..645: mol_type = other DNA
gacatcctgatgacccaatctccatcctccatgtctgtatctctgggagacacagtcagcatcacttgccatgcaagtcagggcattaactctaatatggggtggttgcagcagaaaccagggaaatcatttaagggcctgatctatcatgcaaccaacttggaagatggagttccatcaaggttcagtggcagtggatctggagcagattattctctcaccatcagcagcctggaatctgaagattttgcagactattactgtgtacagtatgctcagtttcctcctacgttcggatcggggaccaagctggaaataaaacggaccgtggccgcccccagcgtgttcatcttccctcccagcgacgagcagctgaagtctggcaccgccagcgtggtgtgcctgctgaacaacttctacccccgcgaggccaaggtgcagtggaaggtggacaacgccctgcagagcggcaacagccaggagagcgtgaccgagcaggactccaaggacagcacctacagcctgagcagcaccctgaccctgagcaaggccgactacgagaagcacaaggtgtacgcctgcgaggtgacccaccagggactgtctagccccgtgaccaagagcttcaaccggggcgagtgctaa

SEQ ID NO: 753 - DNA, 660 bp, synthetic construct
  misc_feature 1..660: note = 13A12.2E5 light chain DNA sequence
  source 1..660: mol_type = other DNA
gatgttgtgatgacccagactccactcactttgtcggttgccattggacaaccagcttccatctcttgcaagtcgagtcagagcctcttatatactaatggaaaaacctatttgaattggttattacagaggccaggccagtctccaaaacgcctaatctatctgctgtctaaattggactctggagtccctgacaggttcagtgccagtggatcagggacagatttcacactgaaaatcagcagagtggaggctgaggatttgggagtttattactgcttgcagagtacacattttccgctcacgttcggtgctgggaccaagctggagatgaaacggaccgtggccgcccccagcgtgttcatcttccctcccagcgacgagcagctgaagtctggcaccgccagcgtggtgtgcctgctgaacaacttctacccccgcgaggccaaggtgcagtggaaggtggacaacgccctgcagagcggcaacagccaggagagcgtgaccgagcaggactccaaggacagcacctacagcctgagcagcaccctgaccctgagcaaggccgactacgagaagcacaaggtgtacgcctgcgaggtgacccaccagggactgtctagccccgtgaccaagagcttcaaccggggcgagtgctaa

SEQ ID NO: 754 - DNA, 660 bp, synthetic construct
  misc_feature 1..660: note = 14H10.2C9 light chain DNA sequence
  source 1..660: mol_type = other DNA
gatgttgtgatgacccagactccactcactttgtcggttaccattggacaaccagcctccatctcttgcaagtcaagtcagagcctcttcgatagtgatggaaagacatatttgaattggttgttacagaggccaggccagtctccaaagcgcctaatctatctggtgtctaaactggactctggagtccctgacaggttcactggcagtggatcagggacagatttcacactgaaaatcagcagagtggaggctgaggatttgggagtttattattgctggcaaggtacacattttcctctcacgttcggtgctgggaccaagctggaaatgaaacggaccgtggccgcccccagcgtgttcatcttccctcccagcgacgagcagctgaagtctggcaccgccagcgtggtgtgcctgctgaacaacttctacccccgcgaggccaaggtgcagtggaaggtggacaacgccctgcagagcggcaacagccaggagagcgtgaccgagcaggactccaaggacagcacctacagcctgagcagcaccctgaccctgagcaaggccgactacgagaagcacaaggtgtacgcctgcgaggtgacccaccagggactgtctagccccgtgaccaagagcttcaaccggggcgagtgctaa

SEQ ID NO: 755 - DNA, 660 bp, synthetic construct
  misc_feature 1..660: note = 15F10.2D6 light chain DNA sequence
  source 1..660: mol_type = other DNA
gatgttttgatgacccaaactccactctccctgcctgtcagtcttggagatcaagcctccatctcttgcagatctagtcagagcattgtacataataatggaaacacctatttagaatggtacctgcagaaaccaggccagtctccaaaactcctgatctacaaagtttccaaccgattttctggggtcccagacaggttcagtggcagtggatcagggacagatttcacactcaagatcagcagagtggaggctgaggatctgggagtttattactgctttcaaggttcacatgttccgctcacgttcggtggtgggaccaagttggagctgaaacggaccgtggccgcccccagcgtgttcatcttccctcccagcgacgagcagctgaagtctggcaccgccagcgtggtgtgcctgctgaacaacttctacccccgcgaggccaaggtgcagtggaaggtggacaacgccctgcagagcggcaacagccaggagagcgtgaccgagcaggactccaaggacagcacctacagcctgagcagcaccctgaccctgagcaaggccgactacgagaagcacaaggtgtacgcctgcgaggtgacccaccagggactgtctagccccgtgaccaagagcttcaaccggggcgagtgctaa

SEQ ID NO: 756 - DNA, 645 bp, synthetic construct
  misc_feature 1..645: note = 19B5.2E6 light chain DNA sequence
  source 1..645: mol_type = other DNA
gatatacaaatgactcaaactacctcttctctttccgcatctttgggtgatcgggtcactatatcctgctccgcctctcaaggcataaacaattacctgaattggtatcagcaaaaaccagacggaactgtaaaattgcttatctactacgcttcaagtctgcatagtggggttcccagcagattttccggttccgggtccggcactgattattctctcacaattagtaacctggaacctgaggacattgcaacttattactgtcaacaatacagtcaggtaccttacactttcggatcaggaacaaagttggaaatcaagaggaccgtggccgcccccagcgtgttcatcttccctcccagcgacgagcagctgaagtctggcaccgccagcgtggtgtgcctgctgaacaacttctacccccgcgaggccaaggtgcagtggaaggtggacaacgccctgcagagcggcaacagccaggagagcgtgaccgagcaggactccaaggacagcacctacagcctgagcagcaccctgaccctgagcaaggccgactacgagaagcacaaggtgtacgcctgcgaggtgacccaccagggactgtctagccccgtgaccaagagcttcaaccggggcgagtgctaa

SEQ ID NO: 757 - DNA, 645 bp, synthetic construct
  misc_feature 1..645: note = 20D11.2C6 light chain DNA sequence
  source 1..645: mol_type = other DNA
gacatccagatgaaccagtctccatccagtctgtctgcatccctcggagacacaattaccatcacttgccgtgccagtcagaacatttatatttggttaagttggtaccagcagaaaccaggaaatattcctaaactcttgatctataaggcttccaacttgcacacaggcgtcccatcaaggtttagtggcagtggatctggaacagatttcacattaaccatcagcactctgcagcctgaagacattgccacttacttctgtctccagggtcaaagttatcctctcacgttcggtgctgggaccaagctggagatgaaacggaccgtggccgcccccagcgtgttcatcttccctcccagcgacgagcagctgaagtctggcaccgccagcgtggtgtgcctgctgaacaacttctacccccgcgaggccaaggtgcagtggaaggtggacaacgccctgcagagcggcaacagccaggagagcgtgaccgagcaggactccaaggacagcacctacagcctgagcagcaccctgaccctgagcaaggccgactacgagaagcacaaggtgtacgcctgcgaggtgacccaccagggactgtctagccccgtgaccaagagcttcaaccggggcgagtgctaa

SEQ ID NO: 758 - DNA, 645 bp, synthetic construct
  misc_feature 1..645: note = 20H5.A3 light chain DNA sequence
  source 1..645: mol_type = other DNA
gatatccagatgacacagactacatcctccctgtctgcctctctgggagacagagtcaccatcaattgcagtgcaagtcaggacattagcaattatttaaactggtatcagcagaaaccagatggaactgttaaactcctgatctattacacatcaagtttactctcaggagtcccatcaaggttcagtggcagtgggtctgggacagattattctctcaccatcagcaacctggaacctgaagatattgccacttacttttgtcagcaatatagtaagcttccctatacgttcggatcggggacccacctggaaataaaacggaccgtggccgcccccagcgtgttcatcttccctcccagcgacgagcagctgaagtctggcaccgccagcgtggtgtgcctgctgaacaacttctacccccgcgaggccaaggtgcagtggaaggtggacaacgccctgcagagcggcaacagccaggagagcgtgaccgagcaggactccaaggacagcacctacagcctgagcagcaccctgaccctgagcaaggccgactacgagaagcacaaggtgtacgcctgcgaggtgacccaccagggactgtctagccccgtgaccaagagcttcaaccggggcgagtgctaa

SEQ ID NO: 759 - DNA, 645 bp, synthetic construct
  misc_feature 1..645: note = 23H9.2E4 light chain DNA sequence
  source 1..645: mol_type = other DNA
gatatccagatgacacagactacatcctccctgtctgcctctctgggagacagagtcaccatcagttgcagtgcaagtcagggcattaacaattatttaaactggtatcagcagaaaccagatggaactgttaaactcctgatctattacgcatcaagtttacactcaggagtcccatcaaggttcagtggcagtgggtctgggacagattattctctcaccatcagcaacctggaacctgaagatattgccacttactattgtcagcagtatagtcaggttccgtatacgttcggatcggggaccaagttggaaataaaacggaccgtggccgcccccagcgtgttcatcttccctcccagcgacgagcagctgaagtctggcaccgccagcgtggtgtgcctgctgaacaacttctacccccgcgaggccaaggtgcagtggaaggtggacaacgccctgcagagcggcaacagccaggagagcgtgaccgagcaggactccaaggacagcacctacagcctgagcagcaccctgaccctgagcaaggccgactacgagaagcacaaggtgtacgcctgcgaggtgacccaccagggactgtctagccccgtgaccaagagcttcaaccggggcgagtgctaa

SEQ ID NO: 760 - DNA, 660 bp, synthetic construct
  misc_feature 1..660: note = 2D10-VH0-VL0 light chain DNA sequence
  source 1..660: mol_type = other DNA
gacatagtaatgacacaggccgcatttagcaatccagtaaccttgggcacatccgcctccatatcttgcaggtcatccaaaagcttgctgcactctgacggtattacttacctgtactggtatttgcagcgacctgggcaatcccctcaactcctgatttaccgcatgagcaacctggcctcaggggtgcctgaccgcttttcaggatcagggagcggcactgacttcaccttgcgaatcagcagagtagaagcagaggatgttggagtttactactgtgcccagatgatcgaatttccacttacttttggggccgggaccattctggagcttaaacggaccgtggccgcccccagcgtgttcatcttccctcccagcgacgagcagctgaagtctggcaccgccagcgtggtgtgcctgctgaacaacttctacccccgcgaggccaaggtgcagtggaaggtggacaacgccctgcagagcggcaacagccaggagagcgtgaccgagcaggactccaaggacagcacctacagcctgagcagcaccctgaccctgagcaaggccgactacgagaagcacaaggtgtacgcctgcgaggtgacccaccagggactgtctagccccgtgaccaagagcttcaaccggggcgagtgctaa

SEQ ID NO: 761 - DNA, 660 bp, synthetic construct
  misc_feature 1..660: note = 3B11.2G2 light chain DNA sequence
  source 1..660: mol_type = other DNA
gatgttgtgatgacccagactccactcactttgtcggttgccattggacaaccagcttccatctcttgcaagtcgagtcagagcctcttatatactaatggaaaaacctatttgaattggttattacagaggccaggccagtctccaaaacgcctaatctatctggtgtctaaattggactctggagtccctgacaggttcagtggcagtggatcagggacagatttcacactgaaaatcagcagagtggaggctgaggatttgggagtttattactgcttgcagagtacacattttccgctcacgttcggtgctgggaccaagctggagctgaaacggaccgtggccgcccccagcgtgttcatcttccctcccagcgacgagcagctgaagtctggcaccgccagcgtggtgtgcctgctgaacaacttctacccccgcgaggccaaggtgcagtggaaggtggacaacgccctgcagagcggcaacagccaggagagcgtgaccgagcaggactccaaggacagcacctacagcctgagcagcaccctgaccctgagcaaggccgactacgagaagcacaaggtgtacgcctgcgaggtgacccaccagggactgtctagccccgtgaccaagagcttcaaccggggcgagtgctaa

SEQ ID NO: 762 - DNA, 660 bp, synthetic construct
  misc_feature 1..660: note = 7D8.2D8 light chain DNA sequence
  source 1..660: mol_type = other DNA
gatgttttgatgacccaaactccactctccctgcctgtcagtcttggagatcaagcctccatctcttgcagatctagtcagagcattgtacatagtaatggaaacacctatttagaatggtacctgcagaaaccaggccagtctccaaagctcctgatctacaaagtttccaaccgattttctggggtcccagacaggttcagtggcagtggatcagggacagatttcacactcaagatcagcagagtggaggctgaggatctgggagtttattactgctttcaaggttcacatgttccgctcacgttcggtgctgggaccaagctggagctgaaacggaccgtggccgcccccagcgtgttcatcttccctcccagcgacgagcagctgaagtctggcaccgccagcgtggtgtgcctgctgaacaacttctacccccgcgaggccaaggtgcagtggaaggtggacaacgccctgcagagcggcaacagccaggagagcgtgaccgagcaggactccaaggacagcacctacagcctgagcagcaccctgaccctgagcaaggccgactacgagaagcacaaggtgtacgcctgcgaggtgacccaccagggactgtctagccccgtgaccaagagcttcaaccggggcgagtgctaa

SEQ ID NO: 763 - DNA, 663 bp, synthetic construct
  misc_feature 1..663: note = mIMT001 light chain DNA sequence
  source 1..663: mol_type = other DNA
gatattgttattactcaggatgagcttagtaatcctgtcactagcggggaaagtgttagtatcagttgtcgttcatccaagtcactcctctacaaagacggcaagacttatctcaactggtttcttcaacgacccggtcaatctccacagctcctgatttacctgatgtcaactcacgcttctggtgttagcgaccgtttctccggaagtggctccgggacagacttcactcttgaaatctcacgtgtaaaagcagaggacgtaggtgtctattattgtcaacagcttgtggactaccccttgacctttggcgctggcacaaagctggaactgaagcgtgctgatgttgcccctactgtgtccatcttccccccctcctccgagcagctgacatccggcggcgcctccgtggtgtgcttcctgaacaacttctaccccaaagacatcaacgtgaaatggaaaatcgacggctccgagaggcagaacggcgtgctgaactcctggacagaccaggactccaaagactccacatactccatgtcctccacactgacactgacaaaagacgagtacgagaggcacaactcctacacatgcgaggccacacacaaaacatccacatcccccatcgtgaaatccttcaacaggaacgagtgctaataa

SEQ ID NO: 764 - DNA, 660 bp, synthetic construct
  misc_feature 1..660: note = 4A11.2B5 light chain DNA sequence
  source 1..660: mol_type = other DNA
gacattgtgatgactcaggcagccttttccaaccctgtaacacttggaactagtgcctccatctcatgccgttccagcaagagtcttttgcacagcgatgggataacctatctctattggtatctgcaacgacccggtcagtcaccccaacttcttatctatcgaatgtctaacttggcctccggcgtgcccgaccgcttttccgggagtgggagcggtacagatttcaccttgcgaatttcccgggttgaggcagaggacgtaggtgtctactattgtgctcagatgcttgagtttcctctcactttcggagccggcaccaaactggaactgaaacggaccgtggccgcccccagcgtgttcatcttccctcccagcgacgagcagctgaagtctggcaccgccagcgtggtgtgcctgctgaacaacttctacccccgcgaggccaaggtgcagtggaaggtggacaacgccctgcagagcggcaacagccaggagagcgtgaccgagcaggactccaaggacagcacctacagcctgagcagcaccctgaccctgagcaaggccgactacgagaagcacaaggtgtacgcctgcgaggtgacccaccagggactgtctagccccgtgaccaagagcttcaaccggggcgagtgctaa

SEQ ID NO: 765 - DNA, 660 bp, synthetic construct; identical to SEQ ID NO: 751
  misc_feature 1..660: note = 4A11.H1L1 light chain DNA sequence
  source 1..660: mol_type = other DNA

SEQ ID NO: 766 - DNA, 660 bp, synthetic construct
  misc_feature 1..660: note = 4A11.H4L2 light chain DNA sequence
  source 1..660: mol_type = other DNA
gatattgtaatgacccaaagccccctgtccttgcctgttaccccaggtgagcctgccagcatatcttgccgatccagtaaatctctgcttcatagcgatggcatcacctatttgtattggtatttgcagaagcccggccagagcccccagttgctgatctacagaatgtccaaccttgctagtggagtgcccgaccggtttagcggttcaggctcagggactgatttcactcttaaaatcagtagggtagaggccgaagacgttggtgtatattattgtgctcagatgttggagtttccactcacatttggacaaggtacaaagctggaaattaagcggaccgtggccgcccccagcgtgttcatcttccctcccagcgacgagcagctgaagtctggcaccgccagcgtggtgtgcctgctgaacaacttctacccccgcgaggccaaggtgcagtggaaggtggacaacgccctgcagagcggcaacagccaggagagcgtgaccgagcaggactccaaggacagcacctacagcctgagcagcaccctgaccctgagcaaggccgactacgagaagcacaaggtgtacgcctgcgaggtgacccaccagggactgtctagccccgtgaccaagagcttcaaccggggcgagtgctaa

SEQ ID NO: 767 - DNA, 660 bp, synthetic construct
  misc_feature 1..660: note = 4G2.2G6 light chain DNA sequence
  source 1..660: mol_type = other DNA
gatgtcgtaatgactcaaacccccctgacccttagtgttactataggccagcccgcaagcatctcctgcaaatcctcccagtctcttctttatactgatggcaaaacctacttgtcctggtttttgcagcgcccaggtcaaagtcctaaacgtcttatttacttggtctctaaactcgattccggcgtgcctgaccggttctccggtagcggtagcggtaccgatttcactttgaagattagccgagttgaggcagaagacctcggggtctactactgccttcagagtacacacttcccacttacatttggcgcaggaaccaagttggaggttaaacggaccgtggccgcccccagcgtgttcatcttccctcccagcgacgagcagctgaagtctggcaccgccagcgtggtgtgcctgctgaacaacttctacccccgcgaggccaaggtgcagtggaaggtggacaacgccctgcagagcggcaacagccaggagagcgtgaccgagcaggactccaaggacagcacctacagcctgagcagcaccctgaccctgagcaaggccgactacgagaagcacaaggtgtacgcctgcgaggtgacccaccagggactgtctagccccgtgaccaagagcttcaaccggggcgagtgctaa

SEQ ID NO: 768 - DNA, 645 bp, synthetic construct
  misc_feature 1..645: note = 6B3.2D3 light chain DNA sequence
  source 1..645: mol_type = other DNA
agtattgtgatgacccagactcccaaattcctgcttgtatcagcaggagacagggttaccataacctgcaaggccagtcagagtgtgagtaatgatgtagcttggtaccaacagaagccagggcagtctcctaaattgttgatatattatgcatccaatcgctacactggagtccctgatcgcttcactggcagtggatatgggacggatttcactttcaccatcagcactgtgcaggctgaagacctggcagtttatttctgtcagcaggattatacctctccgtacacgttcggaggggggaccaagctggaaataaaacggaccgtggccgcccccagcgtgttcatcttccctcccagcgacgagcagctgaagtctggcaccgccagcgtggtgtgcctgctgaacaacttctacccccgcgaggccaaggtgcagtggaaggtggacaacgccctgcagagcggcaacagccaggagagcgtgaccgagcaggactccaaggacagcacctacagcctgagcagcaccctgaccctgagcaaggccgactacgagaagcacaaggtgtacgcctgcgaggtgacccaccagggactgtctagccccgtgaccaagagcttcaaccggggcgagtgctaa

SEQ ID NO: 769 - DNA, 645 bp, synthetic construct
  misc_feature 1..645: note = 6H6.2D6 light chain DNA sequence
  source 1..645: mol_type = other DNA
gacatccagatgacccagaccacctcctccctgtccgcctccctgggcgacagggtgaccatctcctgctccgcctcccagggcatctccaactacctgaactggtaccagcagaagcccgacggcaccgtgaagctgctgatctactacacctcctccctgcactccggcgtgccctccaggttctccggctccggctccggcaccgactactccctgaccatctccaacctggagcccgaggacatcgccacctactactgccagcagtactccgagctgccctacaccttcggctccggcaccaagctggagatcaagaggaccgtggccgcccccagcgtgttcatcttccctcccagcgacgagcagctgaagtctggcaccgccagcgtggtgtgcctgctgaacaacttctacccccgcgaggccaaggtgcagtggaaggtggacaacgccctgcagagcggcaacagccaggagagcgtgaccgagcaggactccaaggacagcacctacagcctgagcagcaccctgaccctgagcaaggccgactacgagaagcacaaggtgtacgcctgcgaggtgacccaccagggactgtctagccccgtgaccaagagcttcaaccggggcgagtgctaa

SEQ ID NO: 770 - DNA, 645 bp, synthetic construct
  misc_feature 1..645: note = 9H2.2H10 light chain DNA sequence
  source 1..645: mol_type = other DNA
gacattgtgatgacccagtctcacaaattcatgtccacatcagtaggagacagggtcagcatcacctgcaaggccagtcaggatgtgagtactgctgtagcctggtatcaacaaaaaccagggcaatctcctaaactactgatttactgggcatccacccggcacactggagtccctgatcgcttcacaggcagtggatctgggacagattatactctcaccatcagcagtgtgcaggctgaagacctggcactttattactgtcagcaacattataccactccgctcacgttcggtgctgggaccaagctggagctgaaacggaccgtggccgcccccagcgtgttcatcttccctcccagcgacgagcagctgaagtctggcaccgccagcgtggtgtgcctgctgaacaacttctacccccgcgaggccaaggtgcagtggaaggtggacaacgccctgcagagcggcaacagccaggagagcgtgaccgagcaggactccaaggacagcacctacagcctgagcagcaccctgaccctgagcaaggccgactacgagaagcacaaggtgtacgcctgcgaggtgacccaccagggactgtctagccccgtgaccaagagcttcaaccggggcgagtgctaa

SEQ ID NO: 771 - DNA, 645 bp, synthetic construct
  misc_feature 1..645: note = 13G4.2F8 light chain DNA sequence
  source 1..645: mol_type = other DNA
gacattgtgatgacccagtctcaaaaattcatgtccacatcagtaggagagagggtcagcatcacctgcaaggccagtcagaatgtaggtactaatgtagcctggtatcagcagaaagcagggcagtctcttgaactgctgatctatggggcatccaaccggcacactggagtccctgatcgcttcacaggcagtggatctgggacagatttcactctcaccatcaccaatgtgcagtctgaagacatgacaaattatttctgtgagcaatatagcaactttcctctcacgttcggtgctgggaccaagctggagctgaaacggaccgtggccgcccccagcgtgttcatcttccctcccagcgacgagcagctgaagtctggcaccgccagcgtggtgtgcctgctgaacaacttctacccccgcgaggccaaggtgcagtggaaggtggacaacgccctgcagagcggcaacagccaggagagcgtgaccgagcaggactccaaggacagcacctacagcctgagcagcaccctgaccctgagcaaggccgactacgagaagcacaaggtgtacgcctgcgaggtgacccaccagggactgtctagccccgtgaccaagagcttcaaccggggcgagtgctaa

SEQ ID NO: 772 - DNA, 660 bp, synthetic construct
  misc_feature 1..660: note = 13H12.2F8 light chain DNA sequence
  source 1..660: mol_type = other DNA
gacgttgttatgacacaaacaccacttacactttctgtaactatcggtcagcctgcctcaatttcatgtaagtcttctcagtccctgtttcatagcgacgggaagacttacctgaattggcttctccaacgaccaggccaatcacccaagcgccttatttatttggtcagtaaattggacagtggagttcccgatagatttaccgggagcggttctgggaccgatttcaccccaaagatctccagggtagaagacgaagatctcggtgtgtactattgctggcaggggacacatttccctctgacattcggtgctggaaccaaacttgagatgaaacggaccgtggccgcccccagcgtgttcatcttccctcccagcgacgagcagctgaagtctggcaccgccagcgtggtgtgcctgctgaacaacttctacccccgcgaggccaaggtgcagtggaaggtggacaacgccctgcagagcggcaacagccaggagagcgtgaccgagcaggactccaaggacagcacctacagcctgagcagcaccctgaccctgagcaaggccgactacgagaagcacaaggtgtacgcctgcgaggtgacccaccagggactgtctagccccgtgaccaagagcttcaaccggggcgagtgctaa

SEQ ID NO: 773 - DNA, 645 bp, synthetic construct
  misc_feature 1..645: note = 15G7.2A7 light chain DNA sequence
  source 1..645: mol_type = other DNA
gacatccagatgaaccagtctccatccagtctgtctgcatccctcggagacacaatttccatcacttgccgtgccagtcagaacattaatatttggttaagctggtaccagcagaaaccaggaaatattcctcaactattgatctataaggcttccaacttgcacacaggcgtcccctcaaggtttagtggcagtggatctggaacagatttcacattaaccatcagcagtctgcagcctgaagacattgccacttactactgtctacagggtcaaagttatcctctcacgttcggtgctgggaccaagctggtgatgaaacggaccgtggccgcccccagcgtgttcatcttccctcccagcgacgagcagctgaagtctggcaccgccagcgtggtgtgcctgctgaacaacttctacccccgcgaggccaaggtgcagtggaaggtggacaacgccctgcagagcggcaacagccaggagagcgtgaccgagcaggactccaaggacagcacctacagcctgagcagcaccctgaccctgagcaaggccgactacgagaagcacaaggtgtacgcctgcgaggtgacccaccagggactgtctagccccgtgaccaagagcttcaaccggggcgagtgctaa

SEQ ID NO: 774 - DNA, 654 bp, synthetic construct
  misc_feature 1..654: note = 19D9.2E5 light chain DNA sequence
  source 1..654: mol_type = other DNA
gatgttgtgatgacccagactccactcactttgtcggttaccattggacaaccagcctccatctcttgtaagtcaagtcagagcctcttacatagtgatggaaagacatatttgaattggttgttacagaggccaggccagcctccaaagcgcctaatgtatctggtgtctacactggactctggagtccctgacaggttcactggcagtggatcagggacagatttcacactgaaaatcagcagagtggaggctgaggatttgggagtttattattgctggcaaggtacacattttcctctcacgttcggtgctgggaccaagccggagcggaccgtggccgcccccagcgtgttcatcttccctcccagcgacgagcagctgaagtctggcaccgccagcgtggtgtgcctgctgaacaacttctacccccgcgaggccaaggtgcagtggaaggtggacaacgccctgcagagcggcaacagccaggagagcgtgaccgagcaggactccaaggacagcacctacagcctgagcagcaccctgaccctgagcaaggccgactacgagaagcacaaggtgtacgcctgcgaggtgacccaccagggactgtctagccccgtgaccaagagcttcaaccggggcgagtgctaa

SEQ ID NO: 775 - DNA, 654 bp, synthetic construct
  misc_feature 1..654: note = 23B10.2B12 light chain DNA sequence
  source 1..654: mol_type = other DNA
gatattgtgatgacgcaggctgcattctccaatccagtcactcttggaacgtcagcttccatctcctgcaggtctagtaagagtctcctacatagtgatggcatcacttatttctattggtatctgcagaggccaggccagtctcctcagctcctgatatatcggatgtccaaccttgcctcaggagtcccagacaggttcagtggcagtgggtcaggaactgatttcacactgagaatcagcagagtggaggctgaggatgtgggtgtttattactgtgctcaaatgctagaattcccgctcacgttcggtgctgggaccaagctggagcggaccgtggccgcccccagcgtgttcatcttccctcccagcgacgagcagctgaagtctggcaccgccagcgtggtgtgcctgctgaacaacttctacccccgcgaggccaaggtgcagtggaaggtggacaacgccctgcagagcggcaacagccaggagagcgtgaccgagcaggactccaaggacagcacctacagcctgagcagcaccctgaccctgagcaaggccgactacgagaagcacaaggtgtacgcctgcgaggtgacccaccagggactgtctagccccgtgaccaagagcttcaaccggggcgagtgctaa

SEQ ID NO: 776 - DNA, 645 bp, synthetic construct
  misc_feature 1..645: note = 24D12.2H9 light chain DNA sequence
  source 1..645: mol_type = other DNA
gacattgtgatgacccagtctcacaaattcatgtccacatcagtaggagacagggtcagcatcacctgcaaggccagtcaggatgtgcgtactgctgtagcctggtatcaacagaaaccagggcaatctcctaaactactgatttactgggcatccacccggcacactggagtccctgatcgcttcacaggcagtggatctgggacagatttcactctcacccttagcaatgtgcagtctgaagacttggcagattatttctgtcagcaatatagtagttatccgtggacgttcggtggaggcaccaagctggaaatcaaacggaccgtggccgcccccagcgtgttcatcttccctcccagcgacgagcagctgaagtctggcaccgccagcgtggtgtgcctgctgaacaacttctacccccgcgaggccaaggtgcagtggaaggtggacaacgccctgcagagcggcaacagccaggagagcgtgaccgagcaggactccaaggacagcacctacagcctgagcagcaccctgaccctgagcaaggccgactacgagaagcacaaggtgtacgcctgcgaggtgacccaccagggactgtctagccccgtgaccaagagcttcaaccggggcgagtgctaa

SEQ ID NO: 777 - DNA, 660 bp, synthetic construct
  misc_feature 1..660: note = F846C.1B2 light chain DNA sequence
  source 1..660: mol_type = other DNA
aacatttggttgacacagtcgccatcatctctggctgtgtctgcaggagaaatggtcactatgacctgtaagtccagtcaaagtgttttatacagttcaaatcagaagaactacttggcctggtaccagcagaaaccagggcagtctcctaaactgctgatctactgggcatccactagggaatctggtgtccctgatcgcttcacaggcagtggatctgggacagacttttctcttaccatcagcagtgtacaagctgaagacctggcagtttattactgtcatcaatatctctcctcgctcacgttcggtgctgggaccaagctggagctgaaacggaccgtggccgcccccagcgtgttcatcttccctcccagcgacgagcagctgaagtctggcaccgccagcgtggtgtgcctgctgaacaacttctacccccgcgaggccaaggtgcagtggaaggtggacaacgccctgcagagcggcaacagccaggagagcgtgaccgagcaggactccaaggacagcacctacagcctgagcagcaccctgaccctgagcaaggccgactacgagaagcacaaggtgtacgcctgcgaggtgacccaccagggactgtctagccccgtgaccaagagcttcaaccggggcgagtgctaa

SEQ ID NO: 778 - DNA, 660 bp, synthetic construct
  misc_feature 1..660: note = F846C.1F5 light chain DNA sequence
  source 1..660: mol_type = other DNA
aacattatgatgacacagtcgccatcatctctggctgtgtctgcaggagaaaaggtcactatgagctgtaagtccagtcaaagtgttttatacagttcaaatcagaagaactacttggcctggtaccagcagaaaccagggcagtctcctaaactgctgatctactgggcatccactagggaatctggtgtccctgatcgcttcacaggcagtggatctgggacagattttactcttaccatcagcagtgtacaacctgaagacctggcagtttattactgtcatcaatacctctcctcgctcacgttcggtgctgggaccaagctggagctgaaacggaccgtggccgcccccagcgtgttcatcttccctcccagcgacgagcagctgaagtctggcaccgccagcgtggtgtgcctgctgaacaacttctacccccgcgaggccaaggtgcagtggaaggtggacaacgccctgcagagcggcaacagccaggagagcgtgaccgagcaggactccaaggacagcacctacagcctgagcagcaccctgaccctgagcaaggccgactacgagaagcacaaggtgtacgcctgcgaggtgacccaccagggactgtctagccccgtgaccaagagcttcaaccggggcgagtgctaa

SEQ ID NO: 779 - DNA, 660 bp, synthetic construct
  misc_feature 1..660: note = F846C.1H12 light chain DNA sequence
  source 1..660: mol_type = other DNA
aacattatgatgacacagtcgccatcatctctggctgtgtctgcaggacaaaaggtcactatgagctgtaagtccagtcaaagtgttttatacagttcaagtcagaagaactacttggcctggtaccagcagaaaccagggcagtctcctaaacttctgatctactgggcatccactagggaatctggtgtccctgatcgcttctcaggcagtggatctgggacagattttactcttaccatcagcagtgtacaacctgaagacctggcagtttattactgtcatcaatacctctcctcgctcacgttcggtgctgggaccaagctggagctgaaacggaccgtggccgcccccagcgtgttcatcttccctcccagcgacgagcagctgaagtctggcaccgccagcgtggtgtgcctgctgaacaacttctacccccgcgaggccaaggtgcagtggaaggtggacaacgccctgcagagcggcaacagccaggagagcgtgaccgagcaggactccaaggacagcacctacagcctgagcagcaccctgaccctgagcaaggccgactacgagaagcacaaggtgtacgcctgcgaggtgacccaccagggactgtctagccccgtgaccaagagcttcaaccggggcgagtgctaa

SEQ ID NO: 780 - DNA, 663 bp, synthetic construct
  misc_feature 1..663: note = F846C.1H5 light chain DNA sequence
  source 1..663: mol_type = other DNA
gatgttgtgatgacccaaactccactctccctgcctgtcagtcttggagatcaagcctccatctcttgcagatctagtcagagccttgtacacaatagtggaaacacctatttacattggtacctgcagaggccaggccagtctccaaacctcctgatctacaaagtttccaaccgattttctggggtcccagacaggttcagtggcagtggatcagggacagatttcacactcaagatcagcagagtggcggctgaggatctgggagtttatttctgctctcaaagtacacatgttcctccgacgttcggtggaggcaccaagctggaaatcaaacggaccgtggccgcccccagcgtgttcatcttccctcccagcgacgagcagctgaagtctggcaccgccagcgtggtgtgcctgctgaacaacttctacccccgcgaggccaaggtgcagtggaaggtggacaacgccctgcagagcggcaacagccaggagagcgtgaccgagcaggactccaaggacagcacctacagcctgagcagcaccctgaccctgagcaaggccgactacgagaagcacaaggtgtacgcctgcgaggtgacccaccagggactgtctagccccgtgaccaagagcttcaaccggggcgagtgctaagga

SEQ ID NO: 781 - DNA, 660 bp, synthetic construct; identical to SEQ ID NO: 778
  misc_feature 1..660: note = F846C.2H3 light chain DNA sequence
  source 1..660: mol_type = other DNA

SEQ ID NO: 782 - DNA, 651 bp, synthetic construct
  misc_feature 1..651: note = F846TC.14A2 light chain DNA sequence
  source 1..651: mol_type = other DNA
caggctgttgtgactcaggaatctgcactcaccacatcacctggtgaaacagtcacactcacttgtcgctcaagtactggggctgttacaactagtaactatgccaactgggtccaagaaaaaccagatcatttattcactggtctaataggtggtatcaataaccgagttccaggtgttcctgccagattctcaggctccctgattggagacaaggcagccctcaccatcacaggggcacagactgaggatgaggcaatatatttctgtgctctatggtatagcaaccattgggtgttcggtggaggaaccaaactgactgtcctacggaccgtggccgcccccagcgtgttcatcttccctcccagcgacgagcagctgaagtctggcaccgccagcgtggtgtgcctgctgaacaacttctacccccgcgaggccaaggtgcagtggaaggtggacaacgccctgcagagcggcaacagccaggagagcgtgaccgagcaggactccaaggacagcacctacagcctgagcagcaccctgaccctgagcaaggccgactacgagaagcacaaggtgtacgcctgcgaggtgacccaccagggactgtctagccccgtgaccaagagcttcaaccggggcgagtgctaa

SEQ ID NO: 783 - DNA, 660 bp, synthetic construct
  misc_feature 1..660: note = F846TC.14E4 light chain DNA sequence
  source 1..660: mol_type = other DNA
gatattgtgatgacgcaggctgcattctccaatccagtcactcttggaacatcagcttccatctcctgcaggtctagtaagagtctcctacatactaatggcatcacttttttgtattggtatctgcagaagccaggccagtctcctcagcccctgatttatcagatgtccaaccttgcctcaggagtcccagacaggttcagtagcagtgggtcaggaactgatttcacactgagaatcagcagagtggaggctgaggatgtgggtgtttattactgtgctcaaaatctagaacttccttggacgttcggtggaggcaccaagctggaaatcaatcggaccgtggccgcccccagcgtgttcatcttccctcccagcgacgagcagctgaagtctggcaccgccagcgtggtgtgcctgctgaacaacttctacccccgcgaggccaaggtgcagtggaaggtggacaacgccctgcagagcggcaacagccaggagagcgtgaccgagcaggactccaaggacagcacctacagcctgagcagcaccctgaccctgagcaaggccgactacgagaagcacaaggtgtacgcctgcgaggtgacccaccagggactgtctagccccgtgaccaagagcttcaaccggggcgagtgctaa

SEQ ID NO: 784 - DNA, 660 bp, synthetic construct
  misc_feature 1..660: note = F846TC.16B5 light chain DNA sequence
  source 1..660: mol_type = other DNA
aacattatgatgacacagtcgccatcatctctggctgtgtctgcaggagaaaaggtcactatgagctgtaagtccagtcaaagtgttttatacagttcaaatcagaagaactacttggcctggtaccagcagaaaccagggcagtctcctaaactactgatctactgggcatccactagggaatctggtgtccctgatcgcttcacaggcagtggatctgggacagattttactcttaccatcagcagtgtacaagctgaagacctggcagtttattactgtcatcaatacctctcctcgctcacgttcggtgctgggaccaagctggagctgaaacggaccgtggccgcccccagcgtgttcatcttccctcccagcgacgagcagctgaagtctggcaccgccagcgtggtgtgcctgctgaacaacttctacccccgcgaggccaaggtgcagtggaaggtggacaacgccctgcagagcggcaacagccaggagagcgtgaccgagcaggactccaaggacagcacctacagcctgagcagcaccctgaccctgagcaaggccgactacgagaagcacaaggtgtacgcctgcgaggtgacccaccagggactgtctagccccgtgaccaagagcttcaaccggggcgagtgctaa

SEQ ID NO: 785 - DNA, 663 bp, synthetic construct
  misc_feature 1..663: note = F846TC.7F10 light chain DNA sequence
  source 1..663: mol_type = other DNA
gacattgtgatgacacagtctccatcctccctggctatgtcagtaggacagaaggtcactatgagctgcaagtccagtcagagccttttaaatagtagcaatcaaaagaactatttggcctggtaccagcagaaaccaggacagtctcctaaacttctggtatactttgcatccactagggaatctggggtccctgatcgcttcataggcagtggatctgggacagatttcactcttaccatcagcagtgtgcaggctgaagacctggcagattacttctgtcagcaacattatagcactccgtacacgttcggagggggggccaagctggaaataaaacggaccgtggccgcccccagcgtgttcatcttccctcccagcgacgagcagctgaagtctggcaccgccagcgtggtgtgcctgctgaacaacttctacccccgcgaggccaaggtgcagtggaaggtggacaacgccctgcagagcggcaacagccaggagagcgtgaccgagcaggactccaaggacagcacctacagcctgagcagcaccctgaccctgagcaaggccgactacgagaagcacaaggtgtacgcctgcgaggtgacccaccagggactgtctagccccgtgaccaagagcttcaaccggggcgagtgctaa

SEQ ID NO: 786 - DNA, 645 bp, synthetic construct
  misc_feature 1..645: note = F847C.10B9 light chain DNA sequence
  source 1..645: mol_type = other DNA
gacatccggatgactcagtctccatccagtctgtctgcatcccttggagacacaattaccatcacttgccatgccagtcagaacattaatgtttggttaagctggtaccagcagaaaccaggaaatattcctaaactattgatctataaggcttccaacttgcacacaggcgtcccatcaaggtttagtggcagtggatctggaacaggtttcacattaaccatcagcagcctgcagcctgaagacattgccacttactactgtcaacagggtcaaagttatccgtacacgttcggaggggggaccaagctggagctgaaacggaccgtggccgcccccagcgtgttcatcttccctcccagcgacgagcagctgaagtctggcaccgccagcgtggtgtgcctgctgaacaacttctacccccgcgaggccaaggtgcagtggaaggtggacaacgccctgcagagcggcaacagccaggagagcgtgaccgagcaggactccaaggacagcacctacagcctgagcagcaccctgaccctgagcaaggccgactacgagaagcacaaggtgtacgcctgcgaggtgacccaccagggactgtctagccccgtgaccaagagcttcaaccggggcgagtgctaa

SEQ ID NO: 787 - DNA, 645 bp, synthetic construct
  misc_feature 1..645: note = F847C.11B1 light chain DNA sequence
  source 1..645: mol_type = other DNA
gaaattgtgttgacccagtctccagcatccctgtccgtgactacaggagaaaaagtcactatcagatgcataaccagcattgatattgatgatgatatgaactggtaccagcagaagccaggggaacctcctaagctccttatttcagaaggcaatactcttcgtcctggagtcccatcccgattctccagcagtggctatggcacagattttgtttttacaattgaaaacacgctctcagaagatgttgcagattactactgtttgcaaagtgataacaagcctctcacgttcggtgctgggaccaagctggagctgaaacggaccgtggccgcccccagcgtgttcatcttccctcccagcgacgagcagctgaagtctggcaccgccagcgtggtgtgcctgctgaacaacttctacccccgcgaggccaaggtgcagtggaaggtggacaacgccctgcagagcggcaacagccaggagagcgtgaccgagcaggactccaaggacagcacctacagcctgagcagcaccctgaccctgagcaaggccgactacgagaagcacaaggtgtacgcctgcgaggtgacccaccagggactgtctagccccgtgaccaagagcttcaaccggggcgagtgctaa

SEQ ID NO: 788 - DNA, 645 bp, synthetic construct
  misc_feature 1..645: note = F847C.12F12 light chain DNA sequence
  source 1..645: mol_type = other DNA
gacatccaggtgattcagtctccatccagtctgtctgcatcccttggagacacaattaccatcacttgccatgccagtcagaacattaatgtttggttaagctggtaccagcagaaaccaggaaatattcctaaactattgatctataaggcttccaacttgcacacaggcgtcccatcaaggtttagtggcagtggatctggaacaggtttcacattaaccatcagcagcctgcagcctgaagacattgccacttactactgtcaacagggtcaaagttatccgtacacgttcggaggggggaccaagctggagctgaaacggaccgtggccgcccccagcgtgttcatcttccctcccagcgacgagcagctgaagtctggcaccgccagcgtggtgtgcctgctgaacaacttctacccccgcgaggccaaggtgcagtggaaggtggacaacgccctgcagagcggcaacagccaggagagcgtgaccgagcaggactccaaggacagcacctacagcctgagcagcaccctgaccctgagcaaggccgactacgagaagcacaaggtgtacgcctgcgaggtgacccaccagggactgtctagccccgtgaccaagagcttcaaccggggcgagtgctaa

SEQ ID NO: 789 - DNA, 646 bp, synthetic construct
  misc_feature 1..646: note = F847C.26F5 light chain DNA sequence
  source 1..646: mol_type = other DNA
gaaattaagatgaaccagtctccatccagtctgtctgcatcccttggagacacaattaccatcacttgccatgccagtcagaacattaatgtttggttaagctggtaccagcagaaaccaggaaatattcctaaactattgatctataaggcttccaacttgcacacaggcgtcccatcaaggtttagtggcagtggatctggaacaggtttcacattaaccatcagcagcctacagcctgaagacattgccacttactactgtcaacagggtcaaagttatccgtacacgttcggaggggggaccaagctggagctgaaaaggaccgtggccgcccccagcgtgttcatcttccctcccagcgacgagcagctgaagtctggcaccgccagcgtggtgtgcctgctgaacaacttctacccccgcgaggccaaggtgcagtggaaggtggacaacgccctgcagagcggcaacagccaggagagcgtgaccgagcaggactccaaggacagcacctacagcctgagcagcaccctgaccctgagcaaggccgactacgagaagcacaaggtgtacgcctgcgaggtgacccaccagggactgtctagccccgtgaccaagagcttcaaccggggcgagtgctaag

SEQ ID NO: 790 - DNA, 651 bp, synthetic construct
  misc_feature 1..651: note = F847C.4B10 light chain DNA sequence
  source 1..651: mol_type = other DNA
caggctgttgtgactcaggaatctgcactcaccacatcacctggtgaaacagtcacactcacttgtcgctcaagtactggggctgttacaactagtaactatgccaactgggtccaagaaaaaccagatcatttattcactggtctaataggtggtaccaacaaccgagctccaggtgttcctgccagattctcaggctccctgattggagacaaggctgccctcaccatcacaggggcacagactgaggatgaggcaatatatttctgtgctctatggtacagcaaccatttagtgttcggtggaggaaccaaactgactgtcctaaggaccgtggccgcccccagcgtgttcatcttccctcccagcgacgagcagctgaagtctggcaccgccagcgtggtgtgcctgctgaacaacttctacccccgcgaggccaaggtgcagtggaaggtggacaacgccctgcagagcggcaacagccaggagagcgtgaccgagcaggactccaaggacagcacctacagcctgagcagcaccctgaccctgagcaaggccgactacgagaagcacaaggtgtacgcctgcgaggtgacccaccagggactgtctagccccgtgaccaagagcttcaaccggggcgagtgctaa

SEQ ID NO: 791 - DNA, 660 bp, synthetic construct
  misc_feature 1..660: note = F849C.8D10 light chain DNA sequence
  source 1..660: mol_type = other DNA
gatgttttgatgacccaaactccactctccctgcctgtcagtcttggagatcaagcctccatctcttgcagatctagtcaggacattgtgcatagtagtggaaacacctatttagaatggtacctgcagaaaccaggccagtctctaaagctcctgatttacaaagtttccaaccgattttctggggtcccagacaggttcagtgccagtggatcagggacagatttcacactcaagatcagcagagtggaggctgaggatctgggagtttattactgctttcaaggttcacatgttcctcccacgttcggctcggggacaaagttggaaataaaacggaccgtggccgcccccagcgtgttcatcttccctcccagcgacgagcagctgaagtctggcaccgccagcgtggtgtgcctgctgaacaacttctacccccgcgaggccaaggtgcagtggaaggtggacaacgccctgcagagcggcaacagccaggagagcgtgaccgagcaggactccaaggacagcacctacagcctgagcagcaccctgaccctgagcaaggccgactacgagaagcacaaggtgtacgcctgcgaggtgacccaccagggactgtctagccccgtgaccaagagcttcaaccggggcgagtgctaa

SEQ ID NO: 792 - DNA, 660 bp, synthetic construct
  misc_feature 1..660: note = F849C.8H3 light chain DNA sequence
  source 1..660: mol_type = other DNA
gatattgggatgaggcaggctgcattctccaatccagtcactcttggaacatcagcttccatctcctgcaggtctagtaagagtctcctatatagtaatggcatcacttatttgtattggtttctccagaagccaggccagtctcctcagctcctgatttatcagatgtccaaccttgcctcaggagtcccagacaggttcagtagcagtgggtcaggaactgatttcacactgagaatcagcagagtggaggctgacgatgtgggtgtttattactgtgctcaaaatctagaacttccgtggacgttcggtggaggcaccaagctggaaatcaaacggaccgtggccgcccccagcgtgttcatcttccctcccagcgacgagcagctgaagtctggcaccgccagcgtggtgtgcctgctgaacaacttctacccccgcgaggccaaggtgcagtggaaggtggacaacgccctgcagagcggcaacagccaggagagcgtgaccgagcaggactccaaggacagcacctacagcctgagcagcaccctgaccctgagcaaggccgactacgagaagcacaaggtgtacgcctgcgaggtgacccaccagggactgtctagccccgtgaccaagagcttcaaccggggcgagtgctaa

SEQ ID NO: 793 - DNA, 657 bp, synthetic construct
  misc_feature 1..657: note = 846.2B11 light chain DNA sequence
  source 1..657: mol_type = other DNA
gacattgtgctgacacagtctcctgcttccttaggtgtttctctggggcagagggccaccatctcatgcagggccagcaaaagtgtcagtacatctggctatagttatatgcactggtaccaacagaaaccaggacagccacccaaactcctcatctatcttgcatccatcctagaatctggggtccctgccaggttcagtggcagtgggtctgggacagacttcaccctcaacatccatcctgtggaggaggaggatgctgcaatctattactgtcagcacagtagggagcttcctctcacgttcggtgctgggaccaagctggagctgaaacggaccgtggccgcccccagcgtgttcatcttccctcccagcgacgagcagctgaagtctggcaccgccagcgtggtgtgcctgctgaacaacttctacccccgcgaggccaaggtgcagtggaaggtggacaacgccctgcagagcggcaacagccaggagagcgtgaccgagcaggactccaaggacagcacctacagcctgagcagcaccctgaccctgagcaaggccgactacgagaagcacaaggtgtacgcctgcgaggtgacccaccagggactgtctagccccgtgaccaagagcttcaaccggggcgagtgctaa

SEQ ID NO: 794 - DNA, 657 bp, synthetic construct
  misc_feature 1..657: note = 846.4D5 light chain DNA sequence
  source 1..657: mol_type = other DNA
aacattgtgctgacccaatctccagcttctttggctgtgtctctagggcagagggccaccatatcctgcagagccagtgaaagtgttgatagttatggcaatagttttatgcactggtaccagcagaaaccaggacagccacccaaactcctcatctatcttgcatccaacctagaatctggggtccctgccaggttcagtggcagtgggtctaggacagacttcaccctcaccattgatcctgtggaggctgatgatgctgcaacctattactgtcagcaaaataatgaggatccgtggacgttcggtggaggcaccaagctggaaatcaaacggaccgtggccgcccccagcgtgttcatcttccctcccagcgacgagcagctgaagtctggcaccgccagcgtggtgtgcctgctgaacaacttctacccccgcgaggccaaggtgcagtggaaggtggacaacgccctgcagagcggcaacagccaggagagcgtgaccgagcaggactccaaggacagcacctacagcctgagcagcaccctgaccctgagcaaggccgactacgagaagcacaaggtgtacgcctgcgaggtgacccaccagggactgtctagccccgtgaccaagagcttcaaccggggcgagtgctaa

SEQ ID NO: 795 - DNA, 660 bp, synthetic construct
  misc_feature 1..660: note = 846T.1H2 light chain DNA sequence
  source 1..660: mol_type = other DNA
gatgttgtgatgacccagactccactcactttgtcggttaccattggacaaccagcctctatctcttgcaagtcaagtcagagtctcttatatagtaatggaaaaacctatttgaattggttattacagaggccaggccagtctccaaagcgcctaatctatctggtgtctaaactggactctggagtccctgacaggttcactggcagtggatcaggaacagattttacactgaaaatcagcagagtggaggctgaggatttgggagtttattactgcgtgcaaggtacacattttcctcagacgttcggtggaggcaccaagctggaaataaaaaggaccgtggccgcccccagcgtgttcatcttccctcccagcgacgagcagctgaagtctggcaccgccagcgtggtgtgcctgctgaacaacttctacccccgcgaggccaaggtgcagtggaaggtggacaacgccctgcagagcggcaacagccaggagagcgtgaccgagcaggactccaaggacagcacctacagcctgagcagcaccctgaccctgagcaaggccgactacgagaagcacaaggtgtacgcctgcgaggtgacccaccagggactgtctagccccgtgaccaagagcttcaaccggggcgagtgctaa

SEQ ID NO: 796 - DNA, 651 bp, synthetic construct; identical to SEQ ID NO: 790
  misc_feature 1..651: note = 847.14H4 light chain DNA sequence
  source 1..651: mol_type = other DNA

SEQ ID NO: 797 - DNA, 360 bp, synthetic construct
  misc_feature 1..360: note = 2D10.2B2 VH DNA sequence
  source 1..360: mol_type = other DNA
caggtccagctgcagcagtctggacctgagctggtgaagcctggggcttcagtgaagatatcctgcaaggcttctggctacaccttcactgactactatataaactgggtgaagcagaggcctggacagggacttgagtggattggatggatttatcctggaagcaatgataccaagtacaatgagaagttcaagggcaaggccacattgactgtagacacatcctccagcacggcctacatgcagctcggcagcctgacctctgaggactctgcggtctatttctgtgcgaattacttcggttgtagcgggtggttcttcgatgtctggggcacagggaccacagtcaccgtctcctca

SEQ ID NO: 798 - DNA, 336 bp, synthetic construct
  misc_feature 1..336: note = 2D10.2B2 VL DNA sequence
  source 1..336: mol_type = other DNA
gatattgtgatgacgcaggctgcattctccaatccagtcactcttggaacgtcagcttccatctcctgcaggtctagtaagagtctcctacatagtgatggcatcacttatttgtattggtatctgcagaggccaggccagtctcctcagctcctgatatatcggatgtccaaccttgcctcaggagtcccagacaggttcagtggcagtgggtcaggaactgatttcacactgagaatcagcagagtggaggctgaggatgtgggtgtttattactgtgctcaaatgatagaattcccgctcacgttcggtgctgggaccatcctggagctgaaa

SEQ ID NO: 799 - DNA, 1356 bp, synthetic construct
  misc_feature 1..1356: note = 2D10.2B2 heavy chain DNA sequence
  source 1..1356: mol_type = other DNA
caggtccagctgcagcagtctggacctgagctggtgaagcctggggcttcagtgaagatatcctgcaaggcttctggctacaccttcactgactactatataaactgggtgaagcagaggcctggacagggacttgagtggattggatggatttatcctggaagcaatgataccaagtacaatgagaagttcaagggcaaggccacattgactgtagacacatcctccagcacggcctacatgcagctcggcagcctgacctctgaggactctgcggtctatttctgtgcgaattacttcggttgtagcgggtggttcttcgatgtctggggcacagggaccacagtcaccgtctcctcagctaagactactcctcccagtgtctaccccctggcccccgtgtgcggcgacacaacaggctcctccgtgacactgggctgcctggtgaaaggctacttccccgagcccgtgacactgacatggaactccggctccctgtcctccggcgtgcacacattccccgccgtgctgcagtccgacctgtacacactgtcctcctccgtgacagtgacatcctccacatggccctcccagtccatcacatgcaacgtggcccaccccgcctcctccacaaaagtggacaaaaaaatcgagcccaggggccccacaatcaaaccctgccccccctgcaaatgccccgcccccaacgccgccggcggcccctccgtgttcatcttcccccccaaaatcaaagacgtgctgatgatctccctgtcccccatcgtgacatgcgtggtggtggacgtgtccgaggacgaccccgacgtgcagatctcctggttcgtgaacaacgtggaggtgcacacagcccagacacagacacacagggaggactacaactccacactgagggtggtgtccgccctgcccatccagcaccaggactggatgtccggcaaagagttcaaatgcaaagtgaacaacaaagacctgggcgcccccatcgagaggacaatctccaaacccaaaggctccgtgagggccccccaggtgtacgtgctgcccccccccgaggaggagatgacaaaaaaacaggtgacactgacatgcatggtgacagacttcatgcccgaggacatctacgtggagtggacaaacaacggcaaaacagagctgaactacaaaaacacagagcccgtgctggactccgacggctcctacttcatgtactccaaactgagggtggagaaaaaaaactgggtggagaggaactcctactcctgctccgtggtgcacgagggcctgcacaaccaccacacaacaaaatccttctccaggacacccggcaaatagtaa

SEQ ID NO: 800 - DNA, 663 bp, synthetic construct
  misc_feature 1..663: note = 2D10.2B2 light chain DNA sequence
  source 1..663: mol_type = other DNA
gatattgtgatgacgcaggctgcattctccaatccagtcactcttggaacgtcagcttccatctcctgcaggtctagtaagagtctcctacatagtgatggcatcacttatttgtattggtatctgcagaggccaggccagtctcctcagctcctgatatatcggatgtccaaccttgcctcaggagtcccagacaggttcagtggcagtgggtcaggaactgatttcacactgagaatcagcagagtggaggctgaggatgtgggtgtttattactgtgctcaaatgatagaattcccgctcacgttcggtgctgggaccatcctggagctgaaacgtgctgatgttgcccctactgtgtccatcttccccccctcctccgagcagctgacatccggcggcgcctccgtggtgtgcttcctgaacaacttctaccccaaagacatcaacgtgaaatggaaaatcgacggctccgagaggcagaacggcgtgctgaactcctggacagaccaggactccaaagactccacatactccatgtcctccacactgacactgacaaaagacgagtacgagaggcacaactcctacacatgcgaggccacacacaaaacatccacatcccccatcgtgaaatccttcaacaggaacgagtgctaataa

SEQ ID NO: 801 - protein, 8 aa, synthetic construct
  REGION 1..8: note = VH_CDR2_42
IYPGSQDT

SEQ ID NO: 802 - protein, 13 aa, synthetic construct
  REGION 1..13: note = VH_CDR3_59
ANYFGSSGWFFDV

SEQ ID NO: 803 - protein, 120 aa, synthetic construct
  REGION 1..120: note = VH-79
QVQLQQSGPELVKPGASVKISCKASGYTFTDYYINWVKQRPGQGLEWIGWIYPGSQDTKYNEKFKGKATLTVDTSSSTAYMQLGSLTSEDSAVYFCANYFGSSGWFFDVWGTGTTVTVSS

SEQ ID NO: 804 - protein, 446 aa, synthetic construct
  REGION 1..446: note = 2D10-VH0-VL0 heavy chain peptide sequence
QVQLQQSGPELVKPGASVKISCKASGYTFTDYYINWVKQRPGQGLEWIGWIYPGSQDTKYNEKFKGKATLTVDTSSSTAYMQLGSLTSEDSAVYFCANYFGSSGWFFDVWGTGTTVTVSSASTKGPSVFPLAPCSRSTSESTAALGCLVKDYFPEPVTVSWNSGALTSGVHTFPAVLQSSGLYSLSSVVTVPSSSLGTKTYTCNVDHKPSNTKVDKRVESKYGPPCPPCPAPEFLGGPSVFLFPPKPKDTLMISRTPEVTCVVVDVSQEDPEVQFNWYVDGVEVHNAKTKPREEQFNSTYRVVSVLTVLHQDWLNGKEYKCKVSNKGLPSSIEKTISKAKGQPREPQVYTLPPSQEEMTKNQVSLTCLVKGFYPSDIAVEWESNGQPENNYKTTPPVLDSDGSFFLYSRLTVDKSRWQEGNVFSCSVMHEALHNHYTQKSLSLSLG

SEQ ID NO: 805 - protein, 219 aa, synthetic construct
  REGION 1..219: note = 2D10-VH0-VL0 light chain peptide sequence
DIVMTQAAFSNPVTLGTSASISCRSSKSLLHSDGITYLYWYLQRPGQSPQLLIYRMSNLASGVPDRFSGSGSGTDFTLRISRVEAEDVGVYYCAQMIEFPLTFGAGTILELKRTVAAPSVFIFPPSDEQLKSGTASVVCLLNNFYPREAKVQWKVDNALQSGNSQESVTEQDSKDSTYSLSSTLTLSKADYEKHKVYACEVTHQGLSSPVTKSFNRGEC

SEQ ID NO: 806 - protein, 120 aa, synthetic construct
  REGION 1..120: note = VH-80 Peptide Sequence
QVQLVQSGAEVKKPGASVKVSCKASGYTFTDYYINWVRQAPGQRLEWMGWIYPGSQDTKYNEKFQGRVTLTVDTSASTAYMELSSLRSEDTAVYFCANYFGSSGWFFDVWGQGTMVTVSS

SEQ ID NO: 807 - protein, 120 aa, synthetic construct; identical to SEQ ID NO: 806
  REGION 1..120: note = VH-81 Peptide Sequence

SEQ ID NO: 808 - protein, 120 aa, synthetic construct; identical to SEQ ID NO: 806
  REGION 1..120: note = VH-82 Peptide Sequence

SEQ ID NO: 809 - protein, 120 aa, synthetic construct; identical to SEQ ID NO: 806
  REGION 1..120: note = VH-83 Peptide Sequence

SEQ ID NO: 810 - protein, 120 aa, synthetic construct
  REGION 1..120: note = VH-84 Peptide Sequence
QVQLVQSGAEVKKPGASVKVSCKASGYTFTDYYINWVRQAPGQRLEWMGWIYPGSQDTKYSQKFQGRVTITVDTSASTAYMELSSLRSEDTAVYYCANYFGSSGWFFDVWGQGTMVTVSS

SEQ ID NO: 811 - protein, 120 aa, synthetic construct; identical to SEQ ID NO: 810
  REGION 1..120: note = VH-85 Peptide Sequence

SEQ ID NO: 812 - protein, 120 aa, synthetic construct; identical to SEQ ID NO: 810
  REGION 1..120: note = VH-86 Peptide Sequence

SEQ ID NO: 813 - protein, 120 aa, synthetic construct; identical to SEQ ID NO: 810
  REGION 1..120: note = VH-87 Peptide Sequence

SEQ ID NO: 814 - protein, 116 aa, synthetic construct
  REGION 1..116: note = VH-88 Peptide Sequence
QIQLVQSGSELKKPGASVKVSCKASGYAFTTYGMSWVRQAPGQGLEWMGWVNTYSGVPTYADDFTGRFVFSLETSVSTAYLQISSLKAEDTAVYFCARGPYAMDYWGQGTLVTVSS

SEQ ID NO: 815 - protein, 116 aa, synthetic construct; identical to SEQ ID NO: 814
  REGION 1..116: note = VH-89 Peptide Sequence

SEQ ID NO: 816 - protein, 116 aa, synthetic construct
  REGION 1..116: note = VH-90 Peptide Sequence
QIQLVQSGSELKKPGASVKVSCKASGYAFTTYGMSWVRQAPGQGLEWMGWVNTYSGVPTSADDFTGRFVFSLETSVSTAYLQISSLKAEDTAVYFCARGPYAMDYWGQGTLVTVSS

SEQ ID NO: 817 - protein, 116 aa, synthetic construct
  REGION 1..116: note = VH-91 Peptide Sequence
QVQLVQSGFELKKPGASVKISCKASGYAFTTYGMSWVRQAPGQGLEWMGWVNTYSGVPTYAQAFTGRFVFSLDTSVSTAYLQISSLKAEDTAVYYCARGPYAMDYWGQGTLVTVSS

SEQ ID NO: 818 - protein, 116 aa, synthetic construct; identical to SEQ ID NO: 817
  REGION 1..116: note = VH-92 Peptide Sequence

SEQ ID NO: 819 - protein, 116 aa, synthetic construct
  REGION 1..116: note = VH-93 Peptide Sequence
QVQLVQSGFELKKPGASVKISCKASGYAFTTYGMSWVRQAPGQGLEWMGWVNTYSGVPTSAQAFTGRFVFSLDTSVSTAYLQISSLKAEDTAVYYCARGPYAMDYWGQGTLVTVSS

SEQ ID NO: 820 - protein, 116 aa, synthetic construct; identical to SEQ ID NO: 819
  REGION 1..116: note = VH-94 Peptide Sequence

SEQ ID NO: 821 - protein, 112 aa, synthetic construct
  REGION 1..112: note = VL-78 Peptide Sequence
DIVMTQSPLSLPVTPGEPASISCRSSKSLLHSDGITYLYWYLQKPGQSPQLLIYRMSNRASGVPDRFSGSGSGTDFTLKISRVEAEDVGVYYCAQMIEFPLTFGQGTKLEIK

SEQ ID NO: 822 - protein, 112 aa, synthetic construct
  REGION 1..112: note = VL-79 Peptide Sequence
DIVMTQSPLSLPVTPGEPASISCRSSKSLLHSDGITYLYWYLQKPGQSPQLLIYRMSNLASGVPDRFSGSGSGTDFTLKISRVEAEDVGVYYCAQMIEFPLTFGQGTKLEIK

SEQ ID NO: 823 - protein, 112 aa, synthetic construct
  REGION 1..112: note = VL-80 Peptide Sequence
DVVMTQSPLSLPVTLGQPASISCRSSKSLLHSDGITYLYWYQQRPGQSPRLLIYRMSNRDSGVPDRFSGSGSGTDFTLKISRVEAEDVGVYYCAQMIEFPLTFGQGTKLEIK

SEQ ID NO: 824 - protein, 112 aa, synthetic construct
  REGION 1..112: note = VL-81 Peptide Sequence
DIVMTQSPLSLPVTLGQPASISCRSSKSLLHSDGITYLYWYQQRPGQSPQLLIYRMSNLDSGVPDRFSGSGSGTDFTLKISRVEAEDVGVYYCAQMIEFPLTFGQGTKLEIK

SEQ ID NO: 825 - protein, 112 aa, synthetic construct; identical to SEQ ID NO: 821
  REGION 1..112: note = VL-82 Peptide Sequence

SEQ ID NO: 826 - protein, 112 aa, synthetic construct; identical to SEQ ID NO: 822
  REGION 1..112: note = VL-83 Peptide Sequence

SEQ ID NO: 827 - protein, 112 aa, synthetic construct; identical to SEQ ID NO: 823
  REGION 1..112: note = VL-84 Peptide Sequence

SEQ ID NO: 828 - protein, 112 aa, synthetic construct; identical to SEQ ID NO: 824

SEQ ID NO: 829 - protein, 107 aa, synthetic construct
  REGION 1..107: note = VL-86 Peptide Sequence
DIQMTQSPSSLSASVGDRVTITCQASQDISNYLNWYQQKPGKAPKLLIYYTSSLLTGVPSRFSGSGSGTDYTFTISSLQPEDIATYYCQQYSKLPYTFGQGTKLEIK

SEQ ID NO: 830 - protein, 107 aa, synthetic construct
  REGION 1..107: note = VL-87 Peptide Sequence
DIQMTQSPSSLSASVGDRVTITCRASQDISNYLNWYQQKPGKAPKLLIYYTSSLLSGVPSRFSGSGSGTDYTLTISSLQPEDFATYYCQQYSKLPYTFGQGTKLEIK

SEQ ID NO: 831 - protein, 107 aa, synthetic construct; identical to SEQ ID NO: 829
  REGION 1..107: note = VL-88 Peptide Sequence

SEQ ID NO: 832 - protein, 107 aa, synthetic construct; identical to SEQ ID NO: 829
  REGION 1..107: note = VL-89 Peptide Sequence

SEQ ID NO: 833 - protein, 107 aa, synthetic construct; identical to SEQ ID NO: 830
  REGION 1..107: note = VL-90 Peptide Sequence

SEQ ID NO: 834 - protein, 107 aa, synthetic construct; identical to SEQ ID NO: 829
  REGION 1..107: note = VL-91 Peptide Sequence

SEQ ID NO: 835 - protein, 107 aa, synthetic construct; identical to SEQ ID NO: 830
  REGION 1..107: note = VL-92 Peptide Sequence

SEQ ID NO: 836 - protein, 446 aa, synthetic construct
  REGION 1..446: note = 2D10-hVH4-HVL1 heavy chain peptide sequence
QVQLVQSGAEVKKPGASVKVSCKASGYTFTDYYINWVRQAPGQRLEWMGWIYPGSQDTKYNEKFQGRVTLTVDTSASTAYMELSSLRSEDTAVYFCANYFGSSGWFFDVWGQGTMVTVSSASTKGPSVFPLAPCSRSTSESTAALGCLVKDYFPEPVTVSWNSGALTSGVHTFPAVLQSSGLYSLSSVVTVPSSSLGTKTYTCNVDHKPSNTKVDKRVESKYGPPCPPCPAPEFLGGPSVFLFPPKPKDTLMISRTPEVTCVVVDVSQEDPEVQFNWYVDGVEVHNAKTKPREEQFNSTYRVVSVLTVLHQDWLNGKEYKCKVSNKGLPSSIEKTISKAKGQPREPQVYTLPPSQEEMTKNQVSLTCLVKGFYPSDIAVEWESNGQPENNYKTTPPVLDSDGSFFLYSRLTVDKSRWQEGNVFSCSVMHEALHNHYTQKSLSLSLG

SEQ ID NO: 837 - protein, 446 aa, synthetic construct; identical to SEQ ID NO: 836
  REGION 1..446: note = 2D10-hVH4-HVL2 heavy chain peptide sequence

SEQ ID NO: 838 - protein, 446 aa, synthetic construct; identical to SEQ ID NO: 836
  REGION 1..446: note = 2D10-hVH4-HVL3 heavy chain peptide sequence

SEQ ID NO: 839 - protein, 446 aa, synthetic construct; identical to SEQ ID NO: 836
  REGION 1..446: note = 2D10-hVH4-HVL4 heavy chain peptide sequence

SEQ ID NO: 840 - protein, 446 aa, synthetic construct
  REGION 1..446: note = 2D10-hVH3-HVL1 heavy chain peptide sequence
QVQLVQSGAEVKKPGASVKVSCKASGYTFTDYYINWVRQAPGQRLEWMGWIYPGSQDTKYSQKFQGRVTITVDTSASTAYMELSSLRSEDTAVYYCANYFGSSGWFFDVWGQGTMVTVSSASTKGPSVFPLAPCSRSTSESTAALGCLVKDYFPEPVTVSWNSGALTSGVHTFPAVLQSSGLYSLSSVVTVPSSSLGTKTYTCNVDHKPSNTKVDKRVESKYGPPCPPCPAPEFLGGPSVFLFPPKPKDTLMISRTPEVTCVVVDVSQEDPEVQFNWYVDGVEVHNAKTKPREEQFNSTYRVVSVLTVLHQDWLNGKEYKCKVSNKGLPSSIEKTISKAKGQPREPQVYTLPPSQEEMTKNQVSLTCLVKGFYPSDIAVEWESNGQPENNYKTTPPVLDSDGSFFLYSRLTVDKSRWQEGNVFSCSVMHEALHNHYTQKSLSLSLG

SEQ ID NO: 841 - protein, 446 aa, synthetic construct; identical to SEQ ID NO: 840
  REGION 1..446: note = 2D10-hVH3-HVL2 heavy chain peptide sequence

SEQ ID NO: 842 - protein, 446 aa, synthetic construct; identical to SEQ ID NO: 840
  REGION 1..446: note = 2D10-hVH3-HVL3 heavy chain peptide sequence

SEQ ID NO: 843 - protein, 446 aa, synthetic construct; identical to SEQ ID NO: 840
  REGION 1..446: note = 2D10-hVH3-HVL4 heavy chain peptide sequence

SEQ ID NO: 844 - protein, 442 aa, synthetic construct
  REGION 1..442: note = 20H5.A3-VH3VL1 heavy chain peptide sequence
QIQLVQSGSELKKPGASVKVSCKASGYAFTTYGMSWVRQAPGQGLEWMGWVNTYSGVPTYADDFTGRFVFSLETSVSTAYLQISSLKAEDTAVYFCARGPYAMDYWGQGTLVTVSSASTKGPSVFPLAPCSRSTSESTAALGCLVKDYFPEPVTVSWNSGALTSGVHTFPAVLQSSGLYSLSSVVTVPSSSLGTKTYTCNVDHKPSNTKVDKRVESKYGPPCPPCPAPEFLGGPSVFLFPPKPKDTLMISRTPEVTCVVVDVSQEDPEVQFNWYVDGVEVHNAKTKPREEQFNSTYRVVSVLTVLHQDWLNGKEYKCKVSNKGLPSSIEKTISKAKGQPREPQVYTLPPSQEEMTKNQVSLTCLVKGFYPSDIAVEWESNGQPENNYKTTPPVLDSDGSFFLYSRLTVDKSRWQEGNVFSCSVMHEALHNHYTQKSLSLSLG

SEQ ID NO: 845 - protein, 442 aa, synthetic construct; identical to SEQ ID NO: 844
  REGION 1..442: note = 20H5.A3-VH3VL3 heavy chain peptide sequence

SEQ ID NO: 846 - protein, 442 aa, synthetic construct
  REGION 1..442: note = 20H5.A3-VH4VL1 heavy chain peptide sequence
QIQLVQSGSELKKPGASVKVSCKASGYAFTTYGMSWVRQAPGQGLEWMGWVNTYSGVPTSADDFTGRFVFSLETSVSTAYLQISSLKAEDTAVYFCARGPYAMDYWGQGTLVTVSSASTKGPSVFPLAPCSRSTSESTAALGCLVKDYFPEPVTVSWNSGALTSGVHTFPAVLQSSGLYSLSSVVTVPSSSLGTKTYTCNVDHKPSNTKVDKRVESKYGPPCPPCPAPEFLGGPSVFLFPPKPKDTLMISRTPEVTCVVVDVSQEDPEVQFNWYVDGVEVHNAKTKPREEQFNSTYRVVSVLTVLHQDWLNGKEYKCKVSNKGLPSSIEKTISKAKGQPREPQVYTLPPSQEEMTKNQVSLTCLVKGFYPSDIAVEWESNGQPENNYKTTPPVLDSDGSFFLYSRLTVDKSRWQEGNVFSCSVMHEALHNHYTQKSLSLSLG

SEQ ID NO: 847 - protein, 442 aa, synthetic construct
  REGION 1..442: note = 20H5.A3-VH5VL1 heavy chain peptide sequence
QVQLVQSGFELKKPGASVKISCKASGYAFTTYGMSWVRQAPGQGLEWMGWVNTYSGVPTYAQAFTGRFVFSLDTSVSTAYLQISSLKAEDTAVYYCARGPYAMDYWGQGTLVTVSSASTKGPSVFPLAPCSRSTSESTAALGCLVKDYFPEPVTVSWNSGALTSGVHTFPAVLQSSGLYSLSSVVTVPSSSLGTKTYTCNVDHKPSNTKVDKRVESKYGPPCPPCPAPEFLGGPSVFLFPPKPKDTLMISRTPEVTCVVVDVSQEDPEVQFNWYVDGVEVHNAKTKPREEQFNSTYRVVSVLTVLHQDWLNGKEYKCKVSNKGLPSSIEKTISKAKGQPREPQVYTLPPSQEEMTKNQVSLTCLVKGFYPSDIAVEWESNGQPENNYKTTPPVLDSDGSFFLYSRLTVDKSRWQEGNVFSCSVMHEALHNHYTQKSLSLSLG

SEQ ID NO: 848 - protein, 442 aa, synthetic construct; identical to SEQ ID NO: 847
  REGION 1..442: note = 20H5.A3-VH5VL3 heavy chain peptide sequence

SEQ ID NO: 849 - protein, 442 aa, synthetic construct
  REGION 1..442: note = 20H5.A3-VH6VL1 heavy chain peptide sequence
QVQLVQSGFELKKPGASVKISCKASGYAFTTYGMSWVRQAPGQGLEWMGWVNTYSGVPTSAQAFTGRFVFSLDTSVSTAYLQISSLKAEDTAVYYCARGPYAMDYWGQGTLVTVSSASTKGPSVFPLAPCSRSTSESTAALGCLVKDYFPEPVTVSWNSGALTSGVHTFPAVLQSSGLYSLSSVVTVPSSSLGTKTYTCNVDHKPSNTKVDKRVESKYGPPCPPCPAPEFLGGPSVFLFPPKPKDTLMISRTPEVTCVVVDVSQEDPEVQFNWYVDGVEVHNAKTKPREEQFNSTYRVVSVLTVLHQDWLNGKEYKCKVSNKGLPSSIEKTISKAKGQPREPQVYTLPPSQEEMTKNQVSLTCLVKGFYPSDIAVEWESNGQPENNYKTTPPVLDSDGSFFLYSRLTVDKSRWQEGNVFSCSVMHEALHNHYTQKSLSLSLG

SEQ ID NO: 850 - protein, 442 aa, synthetic construct; identical to SEQ ID NO: 849
  REGION 1..442: note = 20H5.A3-VH6VL3 heavy chain peptide sequence

SEQ ID NO: 851 - protein, 219 aa, synthetic construct
  REGION 1..219: note = 2D10-hVH4-HVL1 light chain peptide sequence
DIVMTQSPLSLPVTPGEPASISCRSSKSLLHSDGITYLYWYLQKPGQSPQLLIYRMSNRASGVPDRFSGSGSGTDFTLKISRVEAEDVGVYYCAQMIEFPLTFGQGTKLEIKRTVAAPSVFIFPPSDEQLKSGTASVVCLLNNFYPREAKVQWKVDNALQSGNSQESVTEQDSKDSTYSLSSTLTLSKADYEKHKVYACEVTHQGLSSPVTKSFNRGEC

SEQ ID NO: 852 - protein, 219 aa, synthetic construct
  REGION 1..219: note = 2D10-hVH4-HVL2 light chain peptide sequence
DIVMTQSPLSLPVTPGEPASISCRSSKSLLHSDGITYLYWYLQKPGQSPQLLIYRMSNLASGVPDRFSGSGSGTDFTLKISRVEAEDVGVYYCAQMIEFPLTFGQGTKLEIKRTVAAPSVFIFPPSDEQLKSGTASVVCLLNNFYPREAKVQWKVDNALQSGNSQESVTEQDSKDSTYSLSSTLTLSKADYEKHKVYACEVTHQGLSSPVTKSFNRGEC

SEQ ID NO: 853 - protein, 219 aa, synthetic construct
  REGION 1..219: note = 2D10-hVH4-HVL3 light chain peptide sequence
DVVMTQSPLSLPVTLGQPASISCRSSKSLLHSDGITYLYWYQQRPGQSPRLLIYRMSNRDSGVPDRFSGSGSGTDFTLKISRVEAEDVGVYYCAQMIEFPLTFGQGTKLEIKRTVAAPSVFIFPPSDEQLKSGTASVVCLLNNFYPREAKVQWKVDNALQSGNSQESVTEQDSKDSTYSLSSTLTLSKADYEKHKVYACEVTHQGLSSPVTKSFNRGEC

SEQ ID NO: 854 - protein, 219 aa, synthetic construct
  REGION 1..219: note = 2D10-hVH4-HVL4 light chain peptide sequence
DIVMTQSPLSLPVTLGQPASISCRSSKSLLHSDGITYLYWYQQRPGQSPQLLIYRMSNLDSGVPDRFSGSGSGTDFTLKISRVEAEDVGVYYCAQMIEFPLTFGQGTKLEIKRTVAAPSVFIFPPSDEQLKSGTASVVCLLNNFYPREAKVQWKVDNALQSGNSQESVTEQDSKDSTYSLSSTLTLSKADYEKHKVYACEVTHQGLSSPVTKSFNRGEC

SEQ ID NO: 855 - protein, 219 aa, synthetic construct; identical to SEQ ID NO: 851
  REGION 1..219: note = 2D10-hVH3-HVL1 light chain peptide sequence

SEQ ID NO: 856 - protein, 219 aa, synthetic construct; identical to SEQ ID NO: 852
  REGION 1..219: note = 2D10-hVH3-HVL2 light chain peptide sequence

SEQ ID NO: 857 - protein, 219 aa, synthetic construct; identical to SEQ ID NO: 853
  REGION 1..219: note = 2D10-hVH3-HVL3 light chain peptide sequence

SEQ ID NO: 858 - protein, 219 aa, synthetic construct; identical to SEQ ID NO: 854
  REGION 1..219: note = 2D10-hVH3-HVL4 light chain peptide sequence

SEQ ID NO: 859 - protein, 214 aa, synthetic construct
  REGION 1..214: note = 20H5.A3-VH3VL1 light chain peptide sequence
DIQMTQSPSSLSASVGDRVTITCQASQDISNYLNWYQQKPGKAPKLLIYYTSSLLTGVPSRFSGSGSGTDYTFTISSLQPEDIATYYCQQYSKLPYTFGQGTKLEIKRTVAAPSVFIFPPSDEQLKSGTASVVCLLNNFYPREAKVQWKVDNALQSGNSQESVTEQDSKDSTYSLSSTLTLSKADYEKHKVYACEVTHQGLSSPVTKSFNRGEC

SEQ ID NO: 860 - protein, 214 aa, synthetic construct
  REGION 1..214: note = 20H5.A3-VH3VL3 light chain peptide sequence
DIQMTQSPSSLSASVGDRVTITCRASQDISNYLNWYQQKPGKAPKLLIYYTSSLLSGVPSRFSGSGSGTDYTLTISSLQPEDFATYYCQQYSKLPYTFGQGTKLEIKRTVAAPSVFIFPPSDEQLKSGTASVVCLLNNFYPREAKVQWKVDNALQSGNSQESVTEQDSKDSTYSLSSTLTLSKADYEKHKVYACEVTHQGLSSPVTKSFNRGEC

SEQ ID NO: 861 - protein, 214 aa, synthetic construct; identical to SEQ ID NO: 859
  REGION 1..214: note = 20H5.A3-VH4VL1 light chain peptide sequence

SEQ ID NO: 862 - protein, 214 aa, synthetic construct; identical to SEQ ID NO: 859
  REGION 1..214: note = 20H5.A3-VH5VL1 light chain peptide sequence

SEQ ID NO: 863 - protein, 214 aa, synthetic construct; identical to SEQ ID NO: 860
  REGION 1..214: note = 20H5.A3-VH5VL3 light chain peptide sequence

SEQ ID NO: 864 - protein, 214 aa, synthetic construct; identical to SEQ ID NO: 859
  REGION 1..214: note = 20H5.A3-VH6VL1 light chain peptide sequence

SEQ ID NO: 865 - protein, 214 aa, synthetic construct; identical to SEQ ID NO: 860
  REGION 1..214: note = 20H5.A3-VH6VL3 light chain peptide sequence

SEQ ID NO: 866 - DNA, 360 bp, synthetic construct
  misc_feature 1..360: note = 2D10-hVH4-HVL1 VH DNA sequence
  source 1..360: mol_type = other DNA
caggtacagttggttcaatctggggctgaggtgaaaaagccaggggcctccgttaaggtaagctgcaaggcaagcggctacacatttacagactattatatcaactgggtgaggcaagctcctggccagcggcttgagtggatggggtggatctatccggggagtcaagacaccaaatataatgagaagttccagggacgggtgacccttacagtagacacgtctgcaagcactgcctacatggagttgtcatccctccgctctgaagatactgccgtctacttttgcgctaattacttcggaagcagcgggtggttcttcgacgtttggggccagggaactatggtcacagtgtcatca

SEQ ID NO: 867 - DNA, 360 bp, synthetic construct; identical to SEQ ID NO: 866
  misc_feature 1..360: note = 2D10-hVH4-HVL2 VH DNA sequence
  source 1..360: mol_type = other DNA

SEQ ID NO: 868 - DNA, 360 bp, synthetic construct; identical to SEQ ID NO: 866
  misc_feature 1..360: note = 2D10-hVH4-HVL3 VH DNA sequence
  source 1..360: mol_type = other DNA

SEQ ID NO: 869 - DNA, 360 bp, synthetic construct; identical to SEQ ID NO: 866
  misc_feature 1..360: note = 2D10-hVH4-HVL4 VH DNA sequence
  source 1..360: mol_type = other DNA

SEQ ID NO: 870 - DNA, 360 bp, synthetic construct
  misc_feature 1..360: note = 2D10-hVH3-HVL1 VH DNA sequence
  source 1..360: mol_type = other DNA
caagtccagctggttcagtctggtgcggaggtcaagaagccaggggcaagcgtgaaagtctcctgtaaggcaagtggatatactttcacggattactatattaactgggtcagacaggcaccaggtcaacgcctcgaatggatgggctggatatacccaggtagccaagataccaagtactcccagaaatttcagggcagggtgaccattactgtggatacttccgcttctaccgcctacatggaactcagtagcctgcgttcagaggacaccgccgtgtactattgcgctaactatttcggatcctccggatggttcttcgatgtgtggggccaggggacgatggtgacagttagctcc

SEQ ID NO: 871 - DNA, 360 bp, synthetic construct; identical to SEQ ID NO: 870
  misc_feature 1..360: note = 2D10-hVH3-HVL2 VH DNA sequence
  source 1..360: mol_type = other DNA

SEQ ID NO: 872 - DNA, 360 bp, synthetic construct; identical to SEQ ID NO: 870
  misc_feature 1..360: note = 2D10-hVH3-HVL3 VH DNA sequence
  source 1..360: mol_type = other DNA

SEQ ID NO: 873 - DNA, 360 bp, synthetic construct; identical to SEQ ID NO: 870
  misc_feature 1..360: note = 2D10-hVH3-HVL4 VH DNA sequence
  source 1..360: mol_type = other DNA

SEQ ID NO: 874 - DNA, 348 bp, synthetic construct
  misc_feature 1..348: note = 20H5.A3-VH3VL1 VH DNA sequence
  source 1..348: mol_type = other DNA
caaatccagcttgttcagagtggatcagaactcaagaagcccggagcatccgtgaaagtgtcatgcaaggccagtggctacgcttttactacatatgggatgtcttgggttcggcaggcccccggccagggactagagtggatgggctgggttaacacctatagcggagtgcctacgtacgccgatgattttacaggcaggttcgtattttctctcgaaacgtccgtcagtaccgcctacctccaaattagctctctgaaagcagaggacaccgcagtctacttttgcgccagaggtccgtatgctatggattattggggacagggcaccctggtgacagtatcctcc

SEQ ID NO: 875 - DNA, 348 bp, synthetic construct; identical to SEQ ID NO: 874
  misc_feature 1..348: note = 20H5.A3-VH3VL3 VH DNA sequence
  source 1..348: mol_type = other DNA

SEQ ID NO: 876 - DNA, 348 bp, synthetic construct
  misc_feature 1..348: note = 20H5.A3-VH4VL1 VH DNA sequence
  source 1..348: mol_type = other DNA
caaatccagttggtgcagagtggttctgagctgaagaaacctggtgcttcagttaaggtctcttgcaaagcatccggttatgcatttactacctacggaatgtcttgggtaaggcaagctcccggacagggtctcgagtggatggggtgggtgaacacctattccggcgtgcctacgtcagccgacgactttactgggcgttttgtatttagtctagagacgtctgtttcaaccgcctacctgcagatctctagcctgaaagctgaagatacagccgtatatttctgtgcccggggaccatacgccatggactactggggccaagggactctggtgaccgtttctagc

SEQ ID NO: 877 - DNA, 348 bp, synthetic construct
  misc_feature 1..348: note = 20H5.A3-VH5VL1 VH DNA sequence
  source 1..348: mol_type = other DNA
caagtgcaactggtgcagagcggctttgagctgaaaaagcccggcgcctctgtgaagatcagttgcaaagcttccggctacgcctttaccacctatggtatgtcttgggttagacaggctccaggacagggcctggagtggatgggttgggtcaatacctactctggagtgccaacctatgctcaggcattcacaggccggtttgtcttcagtctcgataccagcgtgtcaaccgcatacctgcagatcagctctcttaaagccgaggataccgctgtctactactgtgccagaggaccttatgccatggattactgggggcaaggcaccctcgtcacagtgtcttct

SEQ ID NO: 878 - DNA, 348 bp, synthetic construct; identical to SEQ ID NO: 877
  misc_feature 1..348: note = 20H5.A3-VH5VL3 VH DNA sequence
  source 1..348: mol_type = other DNA

SEQ ID NO: 879 - DNA, 348 bp, synthetic construct
  misc_feature 1..348: note = 20H5.A3-VH6VL1 VH DNA sequence
  source 1..348: mol_type = other DNA
caggttcagcttgtccaatcaggctttgagctgaagaagcctggagctagcgtcaagattagttgtaaggcctcaggctacgctttcaccacctacggaatgtcctgggtgcggcaagccccaggccagggcctggagtggatgggatgggtgaatacgtacagtggcgtccccactagcgcccaggcttttactggaagattcgtgttctctcttgatacctccgtatcaaccgcttacctgcagataagttcactcaaggctgaggataccgccgtgtattattgtgcccgagggccctacgctatggattactggggacagggcacactcgtaacagtgagctct

SEQ ID NO: 880 - DNA, 348 bp, synthetic construct; identical to SEQ ID NO: 879
  misc_feature 1..348: note = 20H5.A3-VH6VL3 VH DNA sequence
  source 1..348: mol_type = other DNA

SEQ ID NO: 881 - DNA, 336 bp, synthetic construct
  misc_feature 1..336: note = 2D10-hVH4-HVL1 VL DNA sequence
  source 1..336: mol_type = other DNA
gacatcgtgatgacccagtctcccttatccctgccagtgacaccaggagaaccagccagcatttcttgccggtctagcaaatctctgctccactctgacggaatcacgtatctgtactggtatctccaaaagcctgggcagtccccacagctgctcatttatcgaatgagtaaccgtgcatctggagtgcccgacagattttcaggctctggcagtgggactgactttacactgaagattagcagagtcgaggctgaggatgtgggggtgtattactgtgcccagatgatagaatttcccctgactttcggacaggggactaaacttgagatcaaa

SEQ ID NO: 882 - DNA, 336 bp, synthetic construct
  misc_feature 1..336: note = 2D10-hVH4-HVL2 VL DNA sequence
  source 1..336: mol_type = other DNA
gatatcgtgatgacccaaagcccactgtctttgcctgttacaccgggcgaaccagcttccatcagttgtcgctccagtaagtcacttctccacagtgacggcatcacatacctgtattggtacctccagaagccaggccaatccccccaactgttgatttatagaatgtccaatctggcatccggagtgcctgaccgcttctccggctctggatctgggacagactttactctgaagatcagcagagtggaggcggaagatgtgggggtctactattgcgctcaaatgatcgagttccctctgacttttggacagggaacgaagctcgaaattaag

SEQ ID NO: 883 - DNA, 336 bp, synthetic construct
  misc_feature 1..336: note = 2D10-hVH4-HVL3 VL DNA sequence
  source 1..336: mol_type = other DNA
gatgtggtgatgactcaaagcccacttagcctgccagttactcttggacagccagccagtatttcttgccggagttccaagagcctgttgcacagcgacgggatcacatatttatactggtaccaacagagacctgggcagtccccgcgcttgctgatctacaggatgtctaacagagactcaggggtccccgacagatttagtggctctggaagcgggacagatttcacactgaagatctcaagggtcgaagccgaggacgtgggcgtgtattactgtgcacagatgatagagttccctcttacattcggccaggggaccaaacttgaaatcaag

SEQ ID NO: 884 - DNA, 336 bp, synthetic construct
  misc_feature 1..336: note = 2D10-hVH4-HVL4 VL DNA sequence
  source 1..336: mol_type = other DNA
gacatagtgatgacccagagcccccttagccttcccgtgacactgggacagccggcgtctatttcttgtaggtcctctaaatctttgttgcacagtgatggaatcacatatctgtactggtaccagcagcggccaggacagagccctcagctgctgatatatcgaatgtcaaacctcgatagcggtgttcctgaccgcttttccggaagcggctccggcaccgactttaccttaaagatctctcgggttgaggccgaggacgtgggagtctactactgcgctcagatgatcgaatttcctctcacgttcggacaaggtacaaagttagagatcaag

SEQ ID NO: 885 - DNA, 336 bp, synthetic construct; identical to SEQ ID NO: 881
  misc_feature 1..336: note = 2D10-hVH3-HVL1 VL DNA sequence
  source 1..336: mol_type = other DNA

SEQ ID NO: 886 - DNA, 336 bp, synthetic construct; identical to SEQ ID NO: 882
  misc_feature 1..336: note = 2D10-hVH3-HVL2 VL DNA sequence
  source 1..336: mol_type = other DNA

SEQ ID NO: 887 - DNA, 336 bp, synthetic construct; identical to SEQ ID NO: 883
  misc_feature 1..336: note = 2D10-hVH3-HVL3 VL DNA sequence
  source 1..336: mol_type = other DNA

SEQ ID NO: 888 - DNA, 336 bp, synthetic construct; identical to SEQ ID NO: 884
  misc_feature 1..336: note = 2D10-hVH3-HVL4 VL DNA sequence
  source 1..336: mol_type = other DNA

SEQ ID NO: 889 - DNA, 321 bp, synthetic construct
  misc_feature 1..321: note = 20H5.A3-VH3VL1 VL DNA sequence
  source 1..321: mol_type = other DNA
gacatccagatgactcagtctccaagcagcctgtccgcttcagtcggggaccgagttacaatcacctgtcaggctagccaggacattagcaactatctgaactggtatcagcagaaacccggaaaggcccctaaacttctgatctactatacatcttcactgctgacgggtgtcccctcccggttctctggctccggctccggtaccgactatacctttactatctcatctctacagcccgaagacatcgcaacatattattgtcaacaatattctaagctgccctacactttcggccaaggaacaaagctggagattaag

SEQ ID NO: 890 - DNA, 321 bp, synthetic construct
  misc_feature 1..321: note = 20H5.A3-VH3VL3 VL DNA sequence
  source 1..321: mol_type = other DNA
gacattcagatgacccaatccccttcctccctaagcgccagcgtgggcgaccgcgtaaccatcacctgtcgagccagtcaggacatttcaaactacctgaactggtatcagcaaaaaccaggcaaagcacctaaactgctcatctactacacttccagtttgctttcaggtgtcccaagccgctttagtggatcaggttccggtaccgattacaccctgacgatctctagtctgcagccagaggacttcgctacgtactattgccagcaatatagcaagctgccctacaccttcggccagggcactaagctggaaatcaag

SEQ ID NO: 891 - DNA, 321 bp, synthetic construct; identical to SEQ ID NO: 889
  misc_feature 1..321: note = 20H5.A3-VH4VL1 VL DNA sequence
  source 1..321: mol_type = other DNA

SEQ ID NO: 892 - DNA, 321 bp, synthetic construct; identical to SEQ ID NO: 889
  misc_feature 1..321: note = 20H5.A3-VH5VL1 VL DNA sequence
  source 1..321: mol_type = other DNA

SEQ ID NO: 893 - DNA, 321 bp, synthetic construct; identical to SEQ ID NO: 890
  misc_feature 1..321: note = 20H5.A3-VH5VL3 VL DNA sequence
  source 1..321: mol_type = other DNA

SEQ ID NO: 894 - DNA, 321 bp, synthetic construct; identical to SEQ ID NO: 889
  misc_feature 1..321: note = 20H5.A3-VH6VL1 VL DNA sequence
  source 1..321: mol_type = other DNA

SEQ ID NO: 895 - DNA, 321 bp, synthetic construct; identical to SEQ ID NO: 890
  misc_feature 1..321: note = 20H5.A3-VH6VL3 VL DNA sequence
  source 1..321: mol_type = other DNA

SEQ ID NO: 896 - DNA, 1344 bp, synthetic construct
  misc_feature 1..1344: note = 2D10-hVH4-HVL1 heavy chain DNA sequence
  source 1..1344: mol_type = other DNA
caggtacagttggttcaatctggggctgaggtgaaaaagccaggggcctccgttaaggtaagctgcaaggcaagcggctacacatttacagactattatatcaactgggtgaggcaagctcctggccagcggcttgagtggatggggtggatctatccggggagtcaagacaccaaatataatgagaagttccagggacgggtgacccttacagtagacacgtctgcaagcactgcctacatggagttgtcatccctccgctctgaagatactgccgtctacttttgcgctaattacttcggaagcagcgggtggttcttcgacgtttggggccagggaactatggtcacagtgtcatcagctagcaccaagggccccagcgtgtttcctctcgctccctgcagccggagcacatccgagagcaccgctgctctgggctgtctcgtgaaggactacttccctgaacccgtcaccgtcagctggaatagcggcgccctgacatccggcgtccacacattccccgctgtcctgcagagcagcggcctgtacagcctgagctccgtggtcaccgtgcctagcagcagcctgggaacaaagacctacacctgcaacgtggaccataagccctccaacaccaaggtggacaagcgggtggaatccaagtatggacccccctgtcctccttgccctgctcctgaatttctcggaggcccctccgtcttcctgtttccccccaagcccaaggacaccctgatgatctcccggacacccgaagtcacctgcgtcgtggtggatgtcagccaggaagatcccgaggtgcagttcaactggtacgtggacggagtggaggtgcataacgccaaaaccaagcccagggaagagcagttcaacagcacctatcgggtcgtgtccgtgctcaccgtcctgcatcaggattggctcaacggcaaggagtacaagtgcaaggtgtccaacaagggcctgccctcctccatcgagaagaccatctccaaggctaagggccaacctcgggagccccaagtgtataccctccctcccagccaggaggagatgaccaagaatcaagtgagcctgacctgcctcgtgaagggattttacccctccgacatcgctgtggaatgggaaagcaatggccaacctgagaacaactacaagaccacaccccccgtgctggactccgatggctccttcttcctgtacagcaggctgaccgtggacaaatcccggtggcaagagggaaacgtgttcagctgctccgtgatgcacgaggctctccacaaccactacacccagaagagcctctccctgagcctcggctagtaa

SEQ ID NO: 897 - DNA, 1344 bp, synthetic construct; identical to SEQ ID NO: 896
  misc_feature 1..1344: note = 2D10-hVH4-HVL2 heavy chain DNA sequence
  source 1..1344: mol_type = other DNA

SEQ ID NO: 898 - DNA, 1344 bp, synthetic construct; identical to SEQ ID NO: 896
  misc_feature 1..1344: note = 2D10-hVH4-HVL3 heavy chain DNA sequence
  source 1..1344: mol_type = other DNA

SEQ ID NO: 899 - DNA, 1344 bp, synthetic construct; identical to SEQ ID NO: 896
  misc_feature 1..1344: note = 2D10-hVH4-HVL4 heavy chain DNA sequence
  source 1..1344: mol_type = other DNA

SEQ ID NO: 900 - DNA, 1344 bp, synthetic construct
  misc_feature 1..1344: note = 2D10-hVH3-HVL1 heavy chain DNA sequence
  source 1..1344: mol_type = other DNA
caagtccagctggttcagtctggtgcggaggtcaagaagccaggggcaagcgtgaaagtctcctgtaaggcaagtggatatactttcacggattactatattaactgggtcagacaggcaccaggtcaacgcctcgaatggatgggctggatatacccaggtagccaagataccaagtactcccagaaatttcagggcagggtgaccattactgtggatacttccgcttctaccgcctacatggaactcagtagcctgcgttcagaggacaccgccgtgtactattgcgctaactatttcggatcctccggatggttcttcgatgtgtggggccaggggacgatggtgacagttagctccgctagcaccaagggccccagcgtgtttcctctcgctccctgcagccggagcacatccgagagcaccgctgctctgggctgtctcgtgaaggactacttccctgaacccgtcaccgtcagctggaatagcggcgccctgacatccggcgtccacacattccccgctgtcctgcagagcagcggcctgtacagcctgagctccgtggtcaccgtgcctagcagcagcctgggaacaaagacctacacctgcaacgtggaccataagccctccaacaccaaggtggacaagcgggtggaatccaagtatggacccccctgtcctccttgccctgctcctgaatttctcggaggcccctccgtcttcctgtttccccccaagcccaaggacaccctgatgatctcccggacacccgaagtcacctgcgtcgtggtggatgtcagccaggaagatcccgaggtgcagttcaactggtacgtggacggagtggaggtgcataacgccaaaaccaagcccagggaagagcagttcaacagcacctatcgggtcgtgtccgtgctcaccgtcctgcatcaggattggctcaacggcaaggagtacaagtgcaaggtgtccaacaagggcctgccctcctccatcgagaagaccatctccaaggctaagggccaacctcgggagccccaagtgtataccctccctcccagccaggaggagatgaccaagaatcaagtgagcctgacctgcctcgtgaagggattttacccctccgacatcgctgtggaatgggaaagcaatggccaacctgagaacaactacaagaccacaccccccgtgctggactccgatggctccttcttcctgtacagcaggctgaccgtggacaaatcccggtggcaagagggaaacgtgttcagctgctccgtgatgcacgaggctctccacaaccactacacccagaagagcctctccctgagcctcggctagtaa

SEQ ID NO: 901 - DNA, 1344 bp, synthetic construct; identical to SEQ ID NO: 900
  misc_feature 1..1344: note = 2D10-hVH3-HVL2 heavy chain DNA sequence
  source 1..1344: mol_type = other DNA

SEQ ID NO: 902 - DNA, 1344 bp, synthetic construct; identical to SEQ ID NO: 900
  misc_feature 1..1344: note = 2D10-hVH3-HVL3 heavy chain DNA sequence
  source 1..1344: mol_type = other DNA

SEQ ID NO: 903 - DNA, 1344 bp, synthetic construct; identical to SEQ ID NO: 900
  misc_feature 1..1344: note = 2D10-hVH3-HVL4 heavy chain DNA sequence
  source 1..1344: mol_type = other DNA

SEQ ID NO: 904 - DNA, 1332 bp, synthetic construct
  misc_feature 1..1332: note = 20H5.A3-VH3VL1 heavy chain DNA sequence
  source 1..1332: mol_type = other DNA
caaatccagcttgttcagagtggatcagaactcaagaagcccggagcatccgtgaaagtgtcatgcaaggccagtggctacgcttttactacatatgggatgtcttgggttcggcaggcccccggccagggactagagtggatgggctgggttaacacctatagcggagtgcctacgtacgccgatgattttacaggcaggttcgtattttctctcgaaacgtccgtcagtaccgcctacctccaaattagctctctgaaagcagaggacaccgcagtctacttttgcgccagaggtccgtatgctatggattattggggacagggcaccctggtgacagtatcctccgctagcaccaagggccccagcgtgtttcctctcgctccctgcagccggagcacatccgagagcaccgctgctctgggctgtctcgtgaaggactacttccctgaacccgtcaccgtcagctggaatagcggcgccctgacatccggcgtccacacattccccgctgtcctgcagagcagcggcctgtacagcctgagctccgtggtcaccgtgcctagcagcagcctgggaacaaagacctacacctgcaacgtggaccataagccctccaacaccaaggtggacaagcgggtggaatccaagtatggacccccctgtcctccttgccctgctcctgaatttctcggaggcccctccgtcttcctgtttccccccaagcccaaggacaccctgatgatctcccggacacccgaagtcacctgcgtcgtggtggatgtcagccaggaagatcccgaggtgcagttcaactggtacgtggacggagtggaggtgcataacgccaaaaccaagcccagggaagagcagttcaacagcacctatcgggtcgtgtccgtgctcaccgtcctgcatcaggattggctcaacggcaaggagtacaagtgcaaggtgtccaacaagggcctgccctcctccatcgagaagaccatctccaaggctaagggccaacctcgggagccccaagtgtataccctccctcccagccaggaggagatgaccaagaatcaagtgagcctgacctgcctcgtgaagggattttacccctccgacatcgctgtggaatgggaaagcaatggccaacctgagaacaactacaagaccacaccccccgtgctggactccgatggctccttcttcctgtacagcaggctgaccgtggacaaatcccggtggcaagagggaaacgtgttcagctgctccgtgatgcacgaggctctccacaaccactacacccagaagagcctctccctgagcctcggctagtaa

SEQ ID NO: 905 - DNA, 1332 bp, synthetic construct; identical to SEQ ID NO: 904
  misc_feature 1..1332: note = 20H5.A3-VH3VL3 heavy chain DNA sequence
  source 1..1332: mol_type = other DNA

SEQ ID NO: 906 - DNA, 1331 bp, synthetic construct
  misc_feature 1..1331: note = 20H5.A3-VH4VL1 heavy chain DNA sequence
  source 1..1331: mol_type = other DNA
caaatccagttggtgcagagtggttctgagctgaagaaacctggtgcttcagttaaggtctcttgcaaagcatccggttatgcatttactacctacggaatgtcttgggtaaggcaagctcccggacagggtctcgagtggatggggtgggtgaacacctattccggcgtgcctacgtcagccgacgactttactgggcgttttgtatttagtctagagacgtctgtttcaaccgcctacctgcagatctctagcctgaaagctgaagatacagccgtatatttctgtgcccggggaccatacgccatggactactggggccaagggactctggtgaccgtttctagcgctagcaccaagggccccagcgtgtttcctctcgctccctgcagccggagcacatccgagagcaccgctgctctgggctgtctcgtgaaggactacttccctgaacccgtcaccgtcagctggaatagcggcgccctgacatccggcgtccacacattccccgctgtcctgcagagcagcggcctgtacagcctgagctccgtggtcaccgtgcctagcagcagcctgggaacaaagacctacacctgcaacgtggaccataagccctccaacaccaaggtggacaagcgggtggaatccaagtatggacccccctgtcctccttgccctgctcctgaatttctcggaggcccctccgtcttcctgtttccccccaagcccaaggacaccctgatgatctcccggacacccgaagtcacctgcgtcgtggtggatgtcagccaggaagatcccgaggtgcagttcaactggtacgtggacggagtggaggtgcataacgccaaaaccaagcccagggaagagcagttcaacagcacctatcgggtcgtgtccgtgctcaccgtcctgcatcaggattggctcaacggcaaggagtacaagtgcaaggtgtccaacaagggcctgccctcctccatcgagaagaccatctccaaggctaagggccaacctcgggagccccaagtgtataccctccctcccagccaggaggagatgaccaagaatcaagtgagcctgacctgcctcgtgaagggattttacccctccgacatcgctgtggaatgggaaagcaatggccaacctgagaacaactacaagaccacaccccccgtgctggactccgatggctccttcttcctgtacagcaggctgaccgtggacaaatcccggtggcaagagggaaacgtgttcagctgctccgtgatgcacgaggctctccacaaccactacacccagaagagcctctccctgagcctcggctagta

SEQ ID NO: 907 - DNA, 1332 bp, synthetic construct
  misc_feature 1..1332: note = 20H5.A3-VH5VL1 heavy chain DNA sequence
  source 1..1332: mol_type = other DNA
caagtgcaactggtgcagagcggctttgagctgaaaaagcccggcgcctctgtgaagatcagttgcaaagcttccggctacgcctttaccacctatggtatgtcttgggttagacaggctccaggacagggcctggagtggatgggttgggtcaatacctactctggagtgccaacctatgctcaggcattcacaggccggtttgtcttcagtctcgataccagcgtgtcaaccgcatacctgcagatcagctctcttaaagccgaggataccgctgtctactactgtgccagaggaccttatgccatggattactgggggcaaggcaccctcgtcacagtgtcttctgctagcaccaagggccccagcgtgtttcctctcgctccctgcagccggagcacatccgagagcaccgctgctctgggctgtctcgtgaaggactacttccctgaacccgtcaccgtcagctggaatagcggcgccctgacatccggcgtccacacattccccgctgtcctgcagagcagcggcctgtacagcctgagctccgtggtcaccgtgcctagcagcagcctgggaacaaagacctacacctgcaacgtggaccataagccctccaacaccaaggtggacaagcgggtggaatccaagtatggacccccctgtcctccttgccctgctcctgaatttctcggaggcccctccgtcttcctgtttccccccaagcccaaggacaccctgatgatctcccggacacccgaagtcacctgcgtcgtggtggatgtcagccaggaagatcccgaggtgcagttcaactggtacgtggacggagtggaggtgcataacgccaaaaccaagcccagggaagagcagttcaacagcacctatcgggtcgtgtccgtgctcaccgtcctgcatcaggattggctcaacggcaaggagtacaagtgcaaggtgtccaacaagggcctgccctcctccatcgagaagaccatctccaaggctaagggccaacctcgggagccccaagtgtataccctccctcccagccaggaggagatgaccaagaatcaagtgagcctgacctgcctcgtgaagggattttacccctccgacatcgctgtggaatgggaaagcaatggccaacctgagaacaactacaagaccacaccccccgtgctggactccgatggctccttcttcctgtacagcaggctgaccgtggacaaatcccggtggcaagagggaaacgtgttcagctgctccgtgatgcacgaggctctccacaaccactacacccagaagagcctctccctgagcctcggctagtaa

SEQ ID NO: 908 - DNA, 1332 bp, synthetic construct; identical to SEQ ID NO: 907
  misc_feature 1..1332: note = 20H5.A3-VH5VL3 heavy chain DNA sequence
  source 1..1332: mol_type = other DNA

SEQ ID NO: 909 - DNA, 1332 bp, synthetic construct
  misc_feature 1..1332: note = 20H5.A3-VH6VL1 heavy chain DNA sequence
  source 1..1332: mol_type = other DNA
caggttcagcttgtccaatcaggctttgagctgaagaagcctggagctagcgtcaagattagttgtaaggcctcaggctacgctttcaccacctacggaatgtcctgggtgcggcaagccccaggccagggcctggagtggatgggatgggtgaatacgtacagtggcgtccccactagcgcccaggcttttactggaagattcgtgttctctcttgatacctccgtatcaaccgcttacctgcagataagttcactcaaggctgaggataccgccgtgtattattgtgcccgagggccctacgctatggattactggggacagggcacactcgtaacagtgagctctgctagcaccaagggccccagcgtgtttcctctcgctccctgcagccggagcacatccgagagcaccgctgctctgggctgtctcgtgaaggactacttccctgaacccgtcaccgtcagctggaatagcggcgccctgacatccggcgtccacacattccccgctgtcctgcagagcagcggcctgtacagcctgagctccgtggtcaccgtgcctagcagcagcctgggaacaaagacctacacctgcaacgtggaccataagccctccaacaccaaggtggacaagcgggtggaatccaagtatggacccccctgtcctccttgccctgctcctgaatttctcggaggcccctccgtcttcctgtttccccccaagcccaaggacaccctgatgatctcccggacacccgaagtcacctgcgtcgtggtggatgtcagccaggaagatcccgaggtgcagttcaactggtacgtggacggagtggaggtgcataacgccaaaaccaagcccagggaagagcagttcaacagcacctatcgggtcgtgtccgtgctcaccgtcctgcatcaggattggctcaacggcaaggagtacaagtgcaaggtgtccaacaagggcctgccctcctccatcgagaagaccatctccaaggctaagggccaacctcgggagccccaagtgtataccctccctcccagccaggaggagatgaccaagaatcaagtgagcctgacctgcctcgtgaagggattttacccctccgacatcgctgtggaatgggaaagcaatggccaacctgagaacaactacaagaccacaccccccgtgctggactccgatggctccttcttcctgtacagcaggctgaccgtggacaaatcccggtggcaagagggaaacgtgttcagctgctccgtgatgcacgaggctctccacaaccactacacccagaagagcctctccctgagcctcggctagtaa

SEQ ID NO: 910 - DNA, 1332 bp, synthetic construct; identical to SEQ ID NO: 909
  misc_feature 1..1332: note = 20H5.A3-VH6VL3 heavy chain DNA sequence
  source 1..1332: mol_type = other DNA

SEQ ID NO: 911 - DNA, 660 bp, synthetic construct
  misc_feature 1..660: note = 2D10-hVH4-HVL1 light chain DNA sequence
  source 1..660: mol_type = other DNA
gacatcgtgatgacccagtctcccttatccctgccagtgacaccaggagaaccagccagcatttcttgccggtctagcaaatctctgctccactctgacggaatcacgtatctgtactggtatctccaaaagcctgggcagtccccacagctgctcatttatcgaatgagtaaccgtgcatctggagtgcccgacagattttcaggctctggcagtgggactgactttacactgaagattagcagagtcgaggctgaggatgtgggggtgtattactgtgcccagatgatagaatttcccctgactttcggacaggggactaaacttgagatcaaaaggaccgtggccgcccccagcgtgttcatcttccctcccagcgacgagcagctgaagtctggcaccgccagcgtggtgtgcctgctgaacaacttctacccccgcgaggccaaggtgcagtggaaggtggacaacgccctgcagagcggcaacagccaggagagcgtgaccgagcaggactccaaggacagcacctacagcctgagcagcaccctgaccctgagcaaggccgactacgagaagcacaaggtgtacgcctgcgaggtgacccaccagggactgtctagccccgtgaccaagagcttcaaccggggcgagtgctaa

SEQ ID NO: 912 - DNA, 660 bp, synthetic construct
  misc_feature 1..660: note = 2D10-hVH4-HVL2 light chain DNA sequence
  source 1..660: mol_type = other DNA
gatatcgtgatgacccaaagcccactgtctttgcctgttacaccgggcgaaccagcttccatcagttgtcgctccagtaagtcacttctccacagtgacggcatcacatacctgtattggtacctccagaagccaggccaatccccccaactgttgatttatagaatgtccaatctggcatccggagtgcctgaccgcttctccggctctggatctgggacagactttactctgaagatcagcagagtggaggcggaagatgtgggggtctactattgcgctcaaatgatcgagttccctctgacttttggacagggaacgaagctcgaaattaagaggaccgtggccgcccccagcgtgttcatcttccctcccagcgacgagcagctgaagtctggcaccgccagcgtggtgtgcctgctgaacaacttctacccccgcgaggccaaggtgcagtggaaggtggacaacgccctgcagagcggcaacagccaggagagcgtgaccgagcaggactccaaggacagcacctacagcctgagcagcaccctgaccctgagcaaggccgactacgagaagcacaaggtgtacgcctgcgaggtgacccaccagggactgtctagccccgtgaccaagagcttcaaccggggcgagtgctaa

SEQ ID NO: 913 - DNA, 660 bp, synthetic construct
  misc_feature 1..660: note = 2D10-hVH4-HVL3 light chain DNA sequence
  source 1..660: mol_type = other DNA
gatgtggtgatgactcaaagcccacttagcctgccagttactcttggacagccagccagtatttcttgccggagttccaagagcctgttgcacagcgacgggatcacatatttatactggtaccaacagagacctgggcagtccccgcgcttgctgatctacaggatgtctaacagagactcaggggtccccgacagatttagtggctctggaagcgggacagatttcacactgaagatctcaagggtcgaagccgaggacgtgggcgtgtattactgtgcacagatgatagagttccctcttacattcggccaggggaccaaacttgaaatcaagaggaccgtggccgcccccagcgtgttcatcttccctcccagcgacgagcagctgaagtctggcaccgccagcgtggtgtgcctgctgaacaacttctacccccgcgaggccaaggtgcagtggaaggtggacaacgccctgcagagcggcaacagccaggagagcgtgaccgagcaggactccaaggacagcacctacagcctgagcagcaccctgaccctgagcaaggccgactacgagaagcacaaggtgtacgcctgcgaggtgacccaccagggactgtctagccccgtgaccaagagcttcaaccggggcgagtgctaa

SEQ ID NO: 914 - DNA, 660 bp, synthetic construct
  misc_feature 1..660: note = 2D10-hVH4-HVL4 light chain DNA sequence
  source 1..660: mol_type = other DNA
gacatagtgatgacccagagcccccttagccttcccgtgacactgggacagccggcgtctatttcttgtaggtcctctaaatctttgttgcacagtgatggaatcacatatctgtactggtaccagcagcggccaggacagagccctcagctgctgatatatcgaatgtcaaacctcgatagcggtgttcctgaccgcttttccggaagcggctccggcaccgactttaccttaaagatctctcgggttgaggccgaggacgtgggagtctactactgcgctcagatgatcgaatttcctctcacgttcggacaaggtacaaagttagagatcaagaggaccgtggccgcccccagcgtgttcatcttccctcccagcgacgagcagctgaagtctggcaccgccagcgtggtgtgcctgctgaacaacttctacccccgcgaggccaaggtgcagtggaaggtggacaacgccctgcagagcggcaacagccaggagagcgtgaccgagcaggactccaaggacagcacctacagcctgagcagcaccctgaccctgagcaaggccgactacgagaagcacaaggtgtacgcctgcgaggtgacccaccagggactgtctagccccgtgaccaagagcttcaaccggggcgagtgctaa

SEQ ID NO: 915 - DNA, 660 bp, synthetic construct; identical to SEQ ID NO: 911
  misc_feature 1..660: note = 2D10-hVH3-HVL1 light chain DNA sequence
  source 1..660: mol_type = other DNA

SEQ ID NO: 916 - DNA, 660 bp, synthetic construct; identical to SEQ ID NO: 912
  misc_feature 1..660: note = 2D10-hVH3-HVL2 light chain DNA sequence
  source 1..660: mol_type = other DNA

SEQ ID NO: 917 - DNA, 660 bp, synthetic construct; identical to SEQ ID NO: 913
  misc_feature 1..660: note = 2D10-hVH3-HVL3 light chain DNA sequence
  source 1..660: mol_type = other DNA

SEQ ID NO: 918 - DNA, 660 bp, synthetic construct; identical to SEQ ID NO: 914
  misc_feature 1..660: note = 2D10-hVH3-HVL4 light chain DNA sequence
  source 1..660: mol_type = other DNA

SEQ ID NO: 919 - DNA, 645 bp, synthetic construct
  misc_feature 1..645: note = 20H5.A3-VH3VL1 light chain DNA sequence
  source 1..645: mol_type = other DNA
gacatccagatgactcagtctccaagcagcctgtccgcttcagtcggggaccgagttacaatcacctgtcaggctagccaggacattagcaactatctgaactggtatcagcagaaacccggaaaggcccctaaacttctgatctactatacatcttcactgctgacgggtgtcccctcccggttctctggctccggctccggtaccgactatacctttactatctcatctctacagcccgaagacatcgcaacatattattgtcaacaatattctaagctgccctacactttcggccaaggaacaaagctggagattaagaggaccgtggccgcccccagcgtgttcatcttccctcccagcgacgagcagctgaagtctggcaccgccagcgtggtgtgcctgctgaacaacttctacccccgcgaggccaaggtgcagtggaaggtggacaacgccctgcagagcggcaacagccaggagagcgtgaccgagcaggactccaaggacagcacctacagcctgagcagcaccctgaccctgagcaaggccgactacgagaagcacaaggtgtacgcctgcgaggtgacccaccagggactgtctagccccgtgaccaagagcttcaaccggggcgagtgctaa

SEQ ID NO: 920 - DNA, 645 bp, synthetic construct
  misc_feature 1..645: note = 20H5.A3-VH3VL3 light chain DNA sequence
  source 1..645: mol_type = other DNA
gacattcagatgacccaatccccttcctccctaagcgccagcgtgggcgaccgcgtaaccatcacctgtcgagccagtcaggacatttcaaactacctgaactggtatcagcaaaaaccaggcaaagcacctaaactgctcatctactacacttccagtttgctttcaggtgtcccaagccgctttagtggatcaggttccggtaccgattacaccctgacgatctctagtctgcagccagaggacttcgctacgtactattgccagcaatatagcaagctgccctacaccttcggccagggcactaagctggaaatcaagaggaccgtggccgcccccagcgtgttcatcttccctcccagcgacgagcagctgaagtctggcaccgccagcgtggtgtgcctgctgaacaacttctacccccgcgaggccaaggtgcagtggaaggtggacaacgccctgcagagcggcaacagccaggagagcgtgaccgagcaggactccaaggacagcacctacagcctgagcagcaccctgaccctgagcaaggccgactacgagaagcacaaggtgtacgcctgcgaggtgacccaccagggactgtctagccccgtgaccaagagcttcaaccggggcgagtgctaa

SEQ ID NO: 921 - DNA, 645 bp, synthetic construct; identical to SEQ ID NO: 919
  misc_feature 1..645: note = 20H5.A3-VH4VL1 light chain DNA sequence
  source 1..645: mol_type = other DNA

SEQ ID NO: 922 - DNA, 645 bp, synthetic construct; identical to SEQ ID NO: 919
  misc_feature 1..645: note = 20H5.A3-VH5VL1 light chain DNA sequence
  source 1..645: mol_type = other DNA

SEQ ID NO: 923 - DNA, 645 bp, synthetic construct; identical to SEQ ID NO: 920
  misc_feature 1..645: note = 20H5.A3-VH5VL3 light chain DNA sequence
  source 1..645: mol_type = other DNA

SEQ ID NO: 924 - DNA, 645 bp, synthetic construct; identical to SEQ ID NO: 919
  misc_feature 1..645: note = 20H5.A3-VH6VL1 light chain DNA sequence
  source 1..645: mol_type = other DNA

SEQ ID NO: 925 - DNA, 645 bp, synthetic construct; identical to SEQ ID NO: 920
  misc_feature 1..645: note = 20H5.A3-VH6VL3 light chain DNA sequence
  source 1..645: mol_type = other DNA

SEQ ID NO: 926 - protein, 112 aa, synthetic construct
  REGION 1..112: note = VH-78 Peptide Sequence
QVQLKQSGPELVKPGDSVKISCKAAGYTFSDYYINWVKQRPGQGLEWIGWIYPVSVNTKYNEKFKGKATLTVDTSSSTAYMQLSSLTSEDSGVYFCAYLDYWGQGTLVTVSA

SEQ ID NO: 927 - protein, 112 aa, synthetic construct
  REGION 1..112: note = VL-75 Peptide Sequence
DVVMTQTPLTLSVTIGQPASISCKSSQSLFHSDGKTYLNWLLQRPGQSPKRLIYLVSKLDSGVPDRFTGSGSGTDFTLKISRVEAEDLGVYYCWQGTHFPLTFGAGTKLEMK

SEQ ID NO: 928 - protein, 112 aa, synthetic construct
  REGION 1..112: note = VL-76 Peptide Sequence
DVVMTQTPLTLSVTIGQPASISCKSSQSLLHSDGKTYLNWLLQRPGQPPKRLMYLVSTLDSGVPDRFTGSGSGTDFTLKISRVEAEDLGVYYCWQGTHFPLTFGAGTKPELK

SEQ ID NO: 929 - protein, 112 aa, synthetic construct
  REGION 1..112: note = VL-77 Peptide Sequence
DIVMTQAAFSNPVTLGTSASISCRSSKSLLHSDGITYFYWYLQRPGQSPQLLIYRMSNLASGVPDRFSGSGSGTDFTLRISRVEAEDVGVYYCAQMLEFPLTFGAGTKLERA

SEQ ID NO: 930 - protein, 125 aa, synthetic construct
  REGION 1..125: note = Exemplary hIgG1, Ch2 constant heavy chain domain 2. Fc region
EPKSCDKTHTCPPCPAPELLGGPSVFLFPPKPKDTLMISRTPEVTCVVVDVSHEDPEVKFNWYVDGVEVHNAKTKPREEQYNSTYRVVSVLTVLHQDWLNGKEYKCKVSNKALPAPIEKTISKAK

SEQ ID NO: 931 - protein, 326 aa, synthetic construct
  REGION 1..326: note = Exemplary hIgG4 Fc region (S228P)
ASTKGPSVFPLAPCSRSTSESTAALGCLVKDYFPEPVTVSWNSGALTSGVHTFPAVLQSSGLYSLSSVVTVPSSSLGTKTYTCNVDHKPSNTKVDKRVESKYGPPCPPCPAPEFLGGPSVFLFPPKPKDTLMISRTPEVTCVVVDVSQEDPEVQFNWYVDGVEVHNAKTKPREEQFNSTYRVVSVLTVLHQDWLNGKEYKCKVSNKGLPSSIEKTISKAKGQPREPQVYTLPPSQEEMTKNQVSLTCLVKGFYPSDIAVEWESNGQPENNYKTTPPVLDSDGSFFLYSRLTVDKSRWQEGNVFSCSVMHEALHNHYTQKSLSLSLG

SEQ ID NO: 932 - protein, 107 aa, synthetic construct [sequence omitted]

SEQ ID NO: 933 - protein, 330 aa, synthetic construct
  REGION 1..330: note = Exemplary mIgG2A(LALAPG) Fc region
AKTTPPSVYPLAPVCGDTTGSSVTLGCLVKGYFPEPVTLTWNSGSLSSGVHTFPAVLQSDLYTLSSSVTVTSSTWPSQSITCNVAHPASSTKVDKKIEPRGPTIKPCPPCKCPAPNAAGGPSVFIFPPKIKDVLMISLSPIVTCVVVDVSEDDPDVQISWFVNNVEVHTAQTQTHREDYNSTLRVVSALPIQHQDWMSGKEFKCKVNNKDLGAPIERTISKPKGSVRAPQVYVLPPPEEEMTKKQVTLTCMVTDFMPEDIYVEWTNNGKTELNYKNTEPVLDSDGSYFMYSKLRVEKKNWVERNSYSCSVVHEGLHNHHTTKSFSRTPGK

SEQ ID NO: 934 - protein, 330 aa, synthetic construct
  REGION 1..330: note = Exemplary mIgG2A(LALA) Fc region
AKTTPPSVYPLAPVCGDTTGSSVTLGCLVKGYFPEPVTLTWNSGSLSSGVHTFPAVLQSDLYTLSSSVTVTSSTWPSQSITCNVAHPASSTKVDKKIEPRGPTIKPCPPCKCPAPNAAGGPSVFIFPPKIKDVLMISLSPIVTCVVVDVSEDDPDVQISWFVNNVEVHTAQTQTHREDYNSTLRVVSALPIQHQDWMSGKEFKCKVNNKDLPAPIERTISKPKGSVRAPQVYVLPPPEEEMTKKQVTLTCMVTDFMPEDIYVEWTNNGKTELNYKNTEPVLDSDGSYFMYSKLRVEKKNWVERNSYSCSVVHEGLHNHHTTKSFSRTPGK

SEQ ID NO: 935 - protein, 10 aa, synthetic construct
  VARIANT 1: note = may be G, or R
  VARIANT 3: note = may be A, I, K, N, S, or T
  VARIANT 4: note = may be F, I, or L
  VARIANT 2: note = may be N, or Y
  VARIANT 5: note = may be I, K, N, R, S, or T
  VARIANT 6: note = may be D, G, I, N, S, or T
  VARIANT 7: note = may be F, G, H, S, or Y
  VARIANT 8: note = may be no amino acid, A, D, G, I, M, N, T, V, W, or Y
  VARIANT 9: note = may be no amino acid, or Y
  VARIANT 10: note = may be no amino acid
EFXXXXXXMG

SEQ ID NO: 936 - protein, 10 aa, synthetic construct
  VARIANT 1: note = no amino acid or J
  VARIANT 2: note = no amino acid or R
  VARIANT 3: note = no amino acid, F, I, L, or V
  VARIANT 4: note = A, D, F, H, K, L, N, S, W, or Y
  VARIANT 5: note = A, D, P, S, T, W, or Y
  VARIANT 6: note = D, E, G, H, K, N, S, V, or Y
  VARIANT 7: note = D, E, G, N, S, or T
  VARIANT 8: note = D, G, I, K, N, Q, R, S, V, or Y
  VARIANT 9: note = A, D, E, G, I, K, N, P, S, T, V, or Y
  VARIANT 10: note = no amino acid, I, P, S, or T
JRXXXXXXAI

SEQ ID NO: 937 - protein, 25 aa, synthetic construct
  VARIANT 1: note = no amino acid or A
  VARIANT 2: note = no amino acid, A, R, or Y
  VARIANT 3: note = no amino acid, A, F, H, K, L, R, S, or V
  VARIANT 4: note = no amino acid, A, D, K, N, R, S, or T
  VARIANT 5: note = no amino acid, A, D, G, H, I, L, N, P, R, S, T, V, or Y
  VARIANT 6: note = no amino acid, A, D, G, H, K, N, P, Q, R, S, or Y
  VARIANT 7: note = no amino acid, D, F, G, H, P, R, S, W, or Y
  VARIANT 8: note = no amino acid, A, D, E, G, I, R, or S
  VARIANT 9: note = no amino acid, A, C, D, E, F, G, I, N, R, S, T, V, or Y
  VARIANT 10: note = no amino acid, A, D, M, P, R, S, T, V, or Y
  VARIANT 11: note = no amino acid, A, D, E, F, L, T, V, or Y
  VARIANT 12: note = no amino acid, A, G, L, M, R, or T
  VARIANT 13: note = no amino acid, A, D, E, F, G, R, S, T, or V
  VARIANT 14: note = no amino acid, A, D, G, L, P, Q, R, S, T, V, or Y
  VARIANT 15: note = no amino acid, A, D, G, N, S, V, W, or Y
  VARIANT 16: note = no amino acid, A, D, E, F, L, P, T, V, W, or Y
  VARIANT 17: note = no amino acid, F, I, L, M, R, or Y
  VARIANT 18: note = is no amino acid, A, D, G, N, or T
  VARIANT 19: note = no amino acid, F, N, S, T, V, or Y
  VARIANT 20: note = no amino acid or L
  VARIANT 21: note = no amino acid or A
  VARIANT 22: note = no amino acid or W
  VARIANT 23: note = no amino acid or F
  VARIANT 24: note = no amino acid or A
  VARIANT 25: note = no amino acid or Y
AAXXXXXXXXXXXXXXXXXXXXXAY

SEQ ID NO: 938 - skipped

SEQ ID NO: 939 - protein, 8 aa, synthetic construct
  VARIANT 1: note = no amino acid, K, L, N, Q, or R
  VARIANT 2: note = no amino acid, A, L, M, or V
  VARIANT 3: note = no amino acid, C, K, or S
  VARIANT 4: note = no amino acid or T
  VARIANT 5: note = no amino acid, A, E, F, G, H, K, Q, R, S, W, or Y
  VARIANT 6: note = no amino acid, A, G, or T
  VARIANT 7: note = no amino acid, I, K, N, S, or T
  VARIANT 8: note = no amino acid, N, or S
KAXXXXIN

SEQ ID NO: 940 - protein, 10 aa, synthetic construct
  VARIANT 1: note = no amino acid, A, E, F, H, L, M, Q, S, V, or W
  VARIANT 2: note = A, H, or Q
  VARIANT 3: note = D, F, G, H, L, M, N, Q, S, T, W, or Y
  VARIANT 4: note = no amino acid or W
  VARIANT 5: note = A, D, I, K, L, N, Q, R, S, T, V, or Y
  VARIANT 6: note = D, E, H, I, K, L, N, Q, S, or T
  VARIANT 7: note = D, F, K, L, N, P, S, T, V, W, or Y
  VARIANT 8: note = H, P, or S
  VARIANT 9: note = F, L, P, Q, R, T, W, or Y
  VARIANT 10: note = no amino acid, T, or V
AAXXXXXXFT
